(19) United States
(12) Patent Application Publication
(10) Pub. No.: US 2025/0302934 A1
(43) Pub. Date: Oct. 2, 2025

(54) SET DOMAIN-CONTAINING 2 (SETD2) VACCINE

(71) Applicant: INSTITUTE FOR CANCER RESEARCH D/B/A THE RESEARCH INSTITUTE OF FOX CHASE CANCE CENTER, Philadelphia, PA (US)

(72) Inventors: Philip ABBOSH, Philadelphia, PA (US); Marya Kozinova, Philadelphia, PA (US); Robert N. Uzzo, Philadelphia, PA (US); Alexander Metz, Philadelphia, PA (US)

(21) Appl. No.: 18/864,271

(22) PCT Filed: May 8, 2023
(86) PCT No.: PCT/US2023/066716

§ 371 Date: Nov. 8, 2024

Related U.S. Application Data
(60) Provisional application No. 63/339,690, filed on May 9, 2022.

(51) Int. Cl. A61K 39/00; A61K 38/00; A61K 45/06; C12N 9/10; C12Q 1/6841; C12Q 1/6886

(52) U.S. Cl. CPC A61K 39/001154; A61K 45/06; C12N 9/1007; C12Q 1/6841; C12Q 1/6886; A61K 38/00; C12Q 2600/156; C12Y 201/01

(57) ABSTRACT

Pharmaceutical compositions comprising one or more peptides derived from aberrantly translated retained introns (ATaRIs), methods for treating cancer with the same, and methods of immunizing a subject against cancer or eliciting an immune response to one or more peptides derived from ATaRIs are provided herein.

### REFERENCE TO SEQUENCE LISTING

[0001] This application includes a Sequence Listing filed electronically as an XML file named 853003346SEQ, created on May 5, 2023, with a size of 10,946,423 bytes. The Sequence Listing is incorporated herein by reference.

### FIELD

[0002] The present disclosure is directed, in part, to pharmaceutical compositions comprising one or more peptides derived from Aberrantly Translated Retained Introns (ATaRIs), methods for treating cancer with the same, and methods of immunizing a subject against cancer or eliciting an immune response to one or more peptides derived from ATaRIs.

### BACKGROUND

[0003] Introns within messenger RNA (mRNA) are normally removed during their processing. However, in some cases, introns are retained, particularly when the SET Domain-Containing 2 (SETD2) gene is mutated, as it commonly in kidney cancer and other forms of cancer (e.g., liver cancer, mesothelioma, lung cancer, etc.). When SETD2 is deleteriously mutated, the mRNA does not splice out introns as normally would be the case. These introns can be translated into non-self peptides in patients having cancer.

### SUMMARY

[0004] The present disclosure provides pharmaceutical compositions comprising one or more peptides derived from ATaRIs.

[0005] The present disclosure also provides methods for treating a subject having cancer, wherein the subject comprises one or more deleterious mutations in the SETD2 gene, by administering one or more peptides derived from ATaRIs and/or one or more mRNA molecules encoding peptides derived from ATaRIs.

[0006] The present disclosure also provides methods of immunizing a subject against cancer or eliciting an immune response to one or more peptides derived from ATaRIs in a subject, wherein the subject comprises one or more deleterious mutations in the SETD2 gene, the method comprising administering to the subject one or more peptides derived from ATaRIs and/or one or more mRNA molecules encoding peptides derived from ATaRIs.

### DESCRIPTION OF EMBODIMENTS

[0007] By vaccinating patients against one or more peptides derived from ATaRIs expressed in tumor cells, the immune system may attack the tumor, since the tumor should be the main anatomic location where these introns will be expressed as proteins. Such a vaccine may be indicated for many or all patients with cancers that harbor deleterious SETD2 mutations. Such a vaccine may contain or encode peptide sequences or other forms of vaccine (such as mRNA or plasmid vaccines or dendritic cell vaccines) which are expected to be aberrantly translated as a result of intron retention. Ideally, the peptide sequences would be derived from introns that are retained/translated across a plurality or majority of human tumors. The vaccines can be administered in combination with other immunotherapies, such as immune checkpoint blockade, for the purpose of immunizing patients against their tumors.

[0008] It is possible that finding enough introns that are translated across a plurality of patients to make a cancer vaccine that is widely applicable (due to variations in HLA genotypes etc.) is not feasible. To overcome this problem, each patient's tumor can undergo sequencing such as, for example, by RNAseq to identify introns which may be translated to generate a vaccine. The vaccine can be tumor specific, thus reducing the likelihood of any autoimmune disease resulting from the vaccine.

[0009] In addition, it is proposed that the same vaccine cocktail (i.e., directed to a plurality of peptides) might be applicable to all patients with deleterious somatic mutations in SETD2. Previous neoantigen-based vaccine approaches typically require: a) whole exome sequencing to identify mutations that result from single nucleotide variations in combination with informatics analyses to predict neoantigens; and b) RNAseq to identify expressed neoantigens. For a majority of therapeutic neoantigen vaccines in clinical trials presently, these assays need to be performed on each subject enrolled in the trial. The present disclosure requires only one molecular feature to be characterized: SETD2 functional status (i.e. whether there is a deleterious mutation). This can be measured in panel sequencing assays, whole genome sequencing assays, whole exome sequencing assays, or potentially with immunohistochemistry of the tumor or RNA sequencing (e.g., intron profile of the tumor).

[0010] Unless defined otherwise, all technical and scientific terms have the same meaning as is commonly understood by one of ordinary skill in the art to which the disclosed embodiments belong.

[0011] As used herein, the terms “a” or “an” mean “at least one” or “one or more” unless the context clearly indicates otherwise.

[0012] As used herein, the term “about” means that the recited numerical value is approximate and small variations would not significantly affect the practice of the disclosed embodiments. Where a numerical value is used, unless indicated otherwise by the context, “about” means the numerical value can vary by ±10% and remain within the scope of the disclosed embodiments.

[0013] As used herein, the term “carrier” means a diluent, adjuvant, or excipient with which a compound is administered in a composition.

[0014] As used herein, the term, “compound” means all stereoisomers, tautomers, isotopes, and polymorphs of the compounds described herein.

[0015] As used herein, the terms “comprising” (and any form of comprising, such as “comprise”, “comprises”, and “comprised”), “having” (and any form of having, such as “have” and “has”), “including” (and any form of including, such as “includes” and “include”), or “containing” (and any form of containing, such as “contains” and “contain”), are inclusive and open-ended and include the options following the terms, and do not exclude additional, unrecited elements or method steps.

[0016] As used herein, the term “contacting” means bringing together two compounds, molecules, or entities in an in vitro system or an in vivo system.

[0017] As used herein, the terms “individual,” “subject,” and “patient,” used interchangeably, mean any animal described herein.

[0018] As used herein, the phrase “in need thereof” means that the “individual,” “subject,” or “patient” has been identified as having a need for the particular method, prevention, or treatment. In some embodiments, the identification can be by any means of diagnosis. In any of the methods, preventions, and treatments described herein, the “individual,” “subject,” or “patient” can be in need thereof. In some embodiments, the “individual,” “subject,” or “patient” is in an environment or will be traveling to an environment, or has traveled to an environment in which a particular disease, disorder, or condition is prevalent.

[0019] As used herein, the phrase “therapeutically effective amount” means the amount of active compound or pharmaceutical agent that elicits the biological or medicinal response that is being sought in a tissue, system, animal, individual or human by a researcher, veterinarian, medical doctor, or other clinician. The therapeutic effect is dependent upon the disorder being treated or the biological effect desired. As such, the therapeutic effect can be a decrease in the severity of symptoms associated with the disorder and/or inhibition (partial or complete) of progression of the disorder, or improved treatment, healing, prevention or elimination of a disorder, or side-effects. The amount needed to elicit the therapeutic response can be based on, for example, the age, health, size, and sex of the subject. Optimal amounts can also be determined based on monitoring of the subject's response to treatment.

[0020] As used herein, the terms “treat,” “treated,” or “treating” mean both therapeutic treatment and prophylactic or preventative measures wherein the object is to prevent or slow down (lessen) an undesired physiological condition, disorder or disease, or obtain beneficial or desired clinical results. For purposes herein, beneficial or desired clinical results include, but are not limited to, alleviation of symptoms; diminishment of extent of condition, disorder or disease; stabilized (i.e., not worsening) state of condition, disorder or disease; delay in onset or slowing of condition, disorder or disease progression; amelioration of the condition, disorder or disease state or remission (whether partial or total), whether detectable or undetectable; an amelioration of at least one measurable physical parameter, not necessarily discernible by the patient; or enhancement or improvement of condition, disorder or disease. Treatment includes eliciting a clinically significant response, optionally without excessive levels of side effects. Treatment also includes prolonging survival as compared to expected survival if not receiving treatment.

[0021] As used herein, the terms “cancer” and “cancerous” refer to or describe the physiological condition in mammals that is typically characterized by unregulated cell growth/proliferation. A “tumor” comprises one or more cancerous cells. Examples of cancer are provided elsewhere herein.

[0022] As used herein, the terms “co-administration” and “co-administering” and “combination therapy” refer to both concurrent administration (administration of two or more therapeutic agents at the same time) and time varied administration (administration of one or more therapeutic agents at a time different from that of the administration of an additional therapeutic agent or agents), as long as the therapeutic agents are present in the patient to some extent, preferably at effective amounts, at the same time. In certain preferred aspects, one or more of the present compounds described herein, are coadministered in combination with at least one additional bioactive agent, especially including an anticancer agent. In particularly preferred aspects, the co-administration of compounds results in synergistic activity and/or therapy, including anticancer activity.

[0023] As used herein, the term “concurrently” means that a drug that is administered with one or more other drugs is administered during the same treatment cycle, on the same day of treatment as the one or more other drugs, and, optionally, at the same time as the one or more other drugs. For instance, for cancer therapies given every 3 weeks, the concurrently administered drugs are each administered on day-1 of a 3-week cycle.

[0024] It should be appreciated that particular features of the disclosure, which are, for clarity, described in the context of separate embodiments, can also be provided in combination in a single embodiment. Conversely, various features of the disclosure which are, for brevity, described in the context of a single embodiment, can also be provided separately or in any suitable subcombination.

[0025] The present disclosure provides pharmaceutical compositions comprising one or more peptides derived from ATaRIs. In some embodiments, the amino acid sequence of the ATaRI peptide comprises any one or more of SEQ ID NOs: 1-8675. In some embodiments, the pharmaceutical composition comprises a plurality of peptides derived from ATaRIs. In some embodiments, the pharmaceutical composition comprises at least two peptides having any of the amino acid sequences set forth in SEQ ID NOs: 1-8675. In some embodiments, the pharmaceutical composition comprises at least three peptides having any of the amino acid sequences set forth in SEQ ID NOs: 1-8675. In some embodiments, the pharmaceutical composition comprises at least four peptides having any of the amino acid sequences set forth in SEQ ID NOs: 1-8675. In some embodiments, the pharmaceutical composition comprises at least ten peptides having any of the amino acid sequences set forth in SEQ ID NOs: 1-8675. In some embodiments, the pharmaceutical composition comprises at least fifty peptides having any of the amino acid sequences set forth in SEQ ID NOs: 1-8675. In some embodiments, the pharmaceutical composition comprises at least one hundred peptides having any of the amino acid sequences set forth in SEQ ID NOs: 1-8675. In some embodiments, the pharmaceutical composition comprises at least five hundred peptides having any of the amino acid sequences set forth in SEQ ID NOs: 1-8675. In some embodiments, the pharmaceutical composition comprises at least one thousand peptides having any of the amino acid sequences set forth in SEQ ID NOs: 1-8675. In some embodiments, the pharmaceutical composition comprises at least two thousand peptides having any of the amino acid sequences set forth in SEQ ID NOs: 1-8675. In some embodiments, the pharmaceutical composition comprises at least three thousand peptides having any of the amino acid sequences set forth in SEQ ID NOs: 1-8675. In some embodiments, the pharmaceutical composition comprises at least four thousand peptides having any of the amino acid sequences set forth in SEQ ID NOs: 1-8675. In some embodiments, the pharmaceutical composition comprises at least five thousand peptides having any of the amino acid sequences set forth in SEQ ID NOs: 1-8675. In some embodiments, the pharmaceutical composition comprises at least six thousand peptides having any of the amino acid sequences set forth in SEQ ID NOs: 1-8675. In some embodiments, the pharmaceutical composition comprises at least seven thousand peptides having any of the amino acid sequences set forth in SEQ ID NOs: 1-8675. In some embodiments, the pharmaceutical composition comprises at least eight thousand peptides having any of the amino acid sequences set forth in SEQ ID NOs: 1-8675.

[0026] In some embodiments, any two or more of the peptides derived from ATaRIs described herein can be combined in the form of a fusion protein or encoded by one or more mRNA molecules or in one or more vectors. In some embodiments, any of the peptides derived from ATaRIs described herein, or fusion proteins comprising the same, can have an amino acid sequence that is 100%, or from 70% to 99.9%, identical to the particular amino acid sequences set forth in SEQ ID NOs: 1-8675. The amino acid sequence of any individual peptide, or fusion proteins comprising the same, can be at least 70%, at least 75%, at least 80%, at least 85%, at least 90%, at least 95%, at least 96%, at least 97%, at least 98%, or at least 99% identical to the particular amino acid sequences set forth in SEQ ID NOs: 1-8675. Identity or similarity with respect to an amino acid or nucleotide sequence is defined herein as the percentage of amino acid residues (or nucleotide residues as the case may be) in the particular peptide or fusion protein that are identical (i.e., same residue) with the amino acid or nucleotide sequence for the peptide or fusion protein having particular amino acid sequences set forth in SEQ ID NOs: 1-8675, after aligning the sequences and introducing gaps, if necessary, to achieve the maximum percent sequence identity. Percent sequence identity can be determined by, for example, the Gap program (Wisconsin Sequence Analysis Package, Version 8 for Unix, Genetics Computer Group, University Research Park, Madison WI), using default settings, which uses the algorithm of Smith and Waterman (Adv. Appl. Math., 1981, 2, 482-489). Any amino acid number calculated as a % identity can be rounded up or down, as the case may be, to the closest whole number.

[0027] Any of the peptides derived from ATaRIs described herein, or fusion proteins comprising the same, can be fragments of the particular amino acid sequences set forth in SEQ ID NOs: 1-8675. The amino acid sequence of any of the peptides derived from ATaRIs described herein, or fusion proteins comprising the same, can be missing consecutive amino acids constituting at least 20%, at least 15%, at least 10%, at least 5%, at least 4%, at least 3%, at least 2%, or at least 1%, of the particular amino acid sequences set forth in SEQ ID NOs: 1-8675. The omitted consecutive amino acids may be from the C-terminus or N-terminus portion of the peptide. Alternately, the omitted consecutive amino acids may be from the internal portion of the peptide, thus retaining at least its C-terminus and N-terminus amino acids of the peptide. In some embodiments, the fragments may comprise 10 amino acids, 20 amino acids, 30 amino acids, 40 amino acids, or 50 amino acids of any of the particular amino acid sequences set forth in SEQ ID NOs: 1-8675.

[0028] Any of the peptides derived from ATaRIs described herein, or fusion proteins comprising the same, can have one or more amino acid additions, deletions, or substitutions compared to the particular amino acid sequences set forth in SEQ ID NOs: 1-8675. Any of the peptides derived from ATaRIs described herein, or fusion proteins comprising the same, can have at least one, at least two, at least three, at least four, at least five, at least six, at least seven, at least eight, at least nine, at least ten, at least eleven, or at least twelve amino acid additions, deletions, or substitutions compared to the particular amino acid sequences set forth in SEQ ID NOs: 1-8675. In some embodiments, the peptides derived from ATaRIs described herein, or fusion proteins comprising the same, have at least one, at least two, at least three, at least four, at least five, or at least six amino acid additions, deletions, or substitutions compared to the particular amino acid sequences set forth in SEQ ID NOs: 1-8675. Any of the peptides derived from ATaRIs described herein, or fusion proteins comprising the same, can have one, two, three, four, five, six, seven, eight, nine, ten, eleven, or twelve amino acid additions, deletions, or substitutions compared to the particular amino acid sequences set forth in SEQ ID NOs: 1-8675. In some embodiments, the peptides derived from ATaRIs described herein, or fusion proteins comprising the same, have one, two, three, four, five, or six amino acid additions, deletions, or substitutions compared to the particular amino acid sequences set forth in SEQ ID NOs: 1-8675. The amino acid additions, deletions, or substitutions can take place at any amino acid position within the peptide derived from ATaRIs described herein.

[0029] Where a particular peptide derived from ATaRIs described herein, or fusion protein comprising the same, comprises at least one or more substitutions, the substituted amino acid(s) can each be, independently, any naturally occurring amino acid or any non-naturally occurring amino acid. Thus, a particular peptide derived from ATaRIs described herein may comprise one or more amino acid substitutions that are naturally occurring amino acids and/or one or more amino acid substitutions that are non-naturally occurring amino acids. Individual amino acid substitutions are selected from any one of the following: 1) the set of amino acids with nonpolar sidechains, for example, Ala, Cys, Ile, Leu, Met, Phe, Pro, Val; 2) the set of amino acids with negatively charged side chains, for example, Asp, Glu; 3) the set of amino acids with positively charged sidechains, for example, Arg, His, Lys; and 4) the set of amino acids with uncharged polar sidechains, for example, Asn, Cys, Gln, Gly, His, Met, Phe, Ser, Thr, Trp, Tyr, to which are added Cys, Gly, Met and Phe. Substitutions of a member of one class with another member of the same class are contemplated herein. Naturally occurring amino acids include, for example, alanine (Ala), arginine (Arg), asparagine (Asn), aspartic acid (Asp), cysteine (Cys), glutamine (Gln), glutamic acid (Glu), glycine (Gly), histidine (His), isoleucine (Ile), leucine (Leu), lysine (Lys), methionine (Met), phenylalanine (Phe), proline (Pro), serine (Ser), threonine (Thr), tryptophan (Trp), tyrosine (Tyr), and valine (Val). Non-naturally occurring amino acids include, for example, norleucine, ornithine, norvaline, homoserine, and other amino acid residue analogues such as those described in Ellman et al., Meth. Enzym., 1991, 202, 301-336. To generate such non-naturally occurring amino acid residues, the procedures of Noren et al., Science, 1989, 244, 182 and Ellman et al., supra, can be used. Briefly, these procedures involve chemically activating a suppressor tRNA with a non-naturally occurring amino acid residue followed by in vitro transcription and translation of the RNA.

[0030] The present disclosure also provides nucleic acid molecules encoding any of the peptides derived from ATaRIs described herein, or fusion proteins comprising the same. One skilled in the art having knowledge of the genetic code can routinely prepare and design a plethora of nucleic acid molecules encoding the same peptide derived from ATaRIs described herein, or fusion protein comprising the same. The length and nucleotide content of any particular nucleic acid molecule is dictated by the desired amino acid sequence of the encoded peptide derived from ATaRIs described herein, or fusion protein comprising the same. The nucleic acid molecules can comprise DNA and/or RNA. In some embodiments, the nucleic acid molecules can comprise mRNA molecules encoding any of the peptides derived from ATaRIs described herein, or fusion proteins comprising the same. Such mRNA molecules can be used as vaccines.

[0031] The present disclosure also provides vectors encoding any of the peptides derived from ATaRIs described herein, or fusion proteins comprising the same. The vector can be capable of expressing any of the peptides derived from ATaRIs described herein, or fusion proteins comprising the same, in the cell of a mammal in a quantity effective to elicit an immune response in the mammal. The vector can be recombinant. The vector can be a plasmid. In some embodiments, the plasmid is a DNA plasmid. The vector can be useful for transfecting cells with nucleic acid encoding any of the peptides derived from ATaRIs described herein, or fusion proteins comprising the same, which the transformed host cell is cultured and maintained under conditions wherein expression of the peptide or fusion protein takes place. In some embodiments, mRNA or peptides can be loaded into a dendritic cell vaccine.

[0032] In some embodiments, the vector is a non-viral vector. In some embodiments, the non-viral vector is RNA, such as mRNA. In some embodiments, the mRNA is protamine-complexed mRNA, wherein the peptide or fusion protein is encoded by the mRNA, and the protamine complexes contribute a strong immunostimulatory signal. An exemplary mRNA vector platform is RNActive® (CureVac Inc).

[0033] In some embodiments, coding sequences can be optimized for stability and high levels of expression. In some instances, codons are selected to reduce secondary structure formation of the RNA such as that formed due to intramolecular bonding.

[0034] In some embodiments, the vectors can comprise regulatory elements for gene expression of the coding sequences of the nucleic acid. The regulatory elements can be a promoter, an enhancer an initiation codon, a stop codon, a polyadenylation signal, or elements that drive high expression of encoded molecules. In some embodiments, the vector can comprise heterologous nucleic acid encoding any of the peptides derived from ATaRIs described herein, or fusion proteins comprising the same, and can further comprise an initiation codon, which is upstream of the peptide coding sequence, and a stop codon, which is downstream of the peptide coding sequence. The initiation and termination codon are in frame with the peptide coding sequence.

[0035] The vector can also comprise a promoter that is operably linked to the peptide or fusion protein coding sequence. The promoter operably linked to the peptide or fusion protein coding sequence can be a promoter from simian virus 40 (SV40), a mouse mammary tumor virus (MMTV) promoter, a human immunodeficiency virus (HIV) promoter such as the bovine immunodeficiency virus (BIV) long terminal repeat (LTR) promoter, a Moloney virus promoter, an avian leukosis virus (ALV) promoter, a cytomegalovirus (CMV) promoter such as the CMV immediate early promoter, Epstein Barr virus (EBV) promoter, or a Rous sarcoma virus (RSV) promoter, or the like. The promoter can also be a promoter from a human gene such as human actin, human myosin, human hemoglobin, human muscle creatine, or human metallothionein. The promoter can also be a tissue specific promoter, such as a muscle or skin specific promoter, natural or synthetic. Representative examples of promoters include the bacteriophage T7 promoter, bacteriophage T3 promoter, SP6 promoter, lac operator-promoter, tac promoter, mycobacterial Hsp60 promoter, SV40 late promoter, SV40 early promoter, RSV-LTR promoter, CMV IE promoter, SV40 early promoter or SV40 late promoter and the CMV IE promoter.

[0036] The vector can also comprise a polyadenylation signal, which can be downstream of the peptide or fusion protein coding sequence. The polyadenylation signal can be a SV40 polyadenylation signal, LTR polyadenylation signal, CMV polyadenylation signal, bovine growth hormone (bGH) polyadenylation signal, human growth hormone (hGH) polyadenylation signal, or human β-globin polyadenylation signal. The SV40 polyadenylation signal can be a polyadenylation signal from a pCEP4 vector (Invitrogen, San Diego, CA).

[0037] The vector can also comprise an enhancer upstream of the peptide encoding sequences. The enhancer can be necessary for DNA expression. The enhancer can be human actin, human myosin, human hemoglobin, human muscle creatine or a viral enhancer such as one from CMV, HA, RSV or EBV. Polynucleotide function enhancers are described in U.S. Pat. Nos. 5,593,972, 5,962,428, and WO94/016737. The vector can also comprise a mammalian origin of replication in order to maintain the vector extrachromosomally and produce multiple copies of the vector in a cell.

[0038] The vector can also comprise a regulatory sequence, which can be well suited for gene expression in a mammalian or human cell into which the vector is administered. The consensus coding sequence can comprise a codon, which can allow more efficient transcription of the coding sequence in the host cell.

[0039] The vector can be pSE420 (Invitrogen, San Diego, Calif.) or pET28b (EMD Millipore, Billerca, Mass.), which can be used for protein production in Escherichia coli (E. coli). The vector can also be pYES2 (Invitrogen, San Diego, Calif.), which can be used for protein production in Saccharomyces cerevisiae strains of yeast. The vector can also be of the MAXBAC™ complete baculovirus expression system (Invitrogen, San Diego, Calif.), which can be used for protein production in insect cells. The vector can also be pcDNA I or pcDNA3 (Invitrogen, San Diego, Calif.), which may be used for protein production in mammalian cells such as Chinese hamster ovary (CHO) cells. The vector can be expression vectors or systems to produce protein by routine techniques and readily available starting materials including Sambrook et al., Molecular Cloning and Laboratory Manual, Second Ed., Cold Spring Harbor (1989).

[0040] In some embodiments, the vector is a viral vector. Suitable viral vectors include, but are not limited to, an adenovirus vector, an adeno-associated virus vector, a poxvirus vector (such as, for example, vaccinia virus vector), a paramyxovirus vector, a fowlpox virus vector, an attenuated yellow fever vectors (such as, for example, YFV-17D), an alphavirus vector, a retrovirus vector (such as, for example, lentivirus vector), a Sendai virus vector, and cytomegalovirus (CMV) vector. Suitable adenovirus vectors include, but are not limited to, adenovirus 4, adenovirus 5, chimpanzee adenovirus 3, chimpanzee adenovirus 63, and chimpanzee adenovirus 68. A suitable vaccinia virus vector includes, but is not limited to, modified vaccinia Ankara (MVA). Suitable paramyxovirus vectors include, but are not limited to, modified parainfluenza virus (PIV2) and recombinant human parainfluenza virus (rHPIV2). Suitable CMV vectors include, but are not limited to, Rhesus Macaque CMV (RhCMV) vectors and Human CMV (HCMV) vectors. In some embodiments, the vector is present within a composition comprising a pharmaceutically acceptable carrier. One skilled in the art is readily familiar with numerous vectors, many of which are commercially available.

[0041] The present disclosure also provides host cells comprising any of the nucleic acid molecules or vectors disclosed herein. The host cells can be used, for example, to express the peptides or fusion proteins, or fragments of thereof. The peptides of fusion proteins, or fragments thereof, can also be expressed in cells in vivo. The host cell that is transformed (for example, transfected) to produce the peptides or fusion proteins, or fragments of thereof, can be an immortalized mammalian cell line, such as those of lymphoid origin (for example, a myeloma, hybridoma, trioma or quadroma cell line). The host cell can also include normal lymphoid cells, such as B-cells, that have been immortalized by transformation with a virus (for example, the Epstein-Barr virus).

[0042] In some embodiments, the host cells include, but are not limited to: bacterial cells, such as E. coli, Caulobacter crescentus, Streptomyces species, and Salmonella typhimurium; yeast cells, such as Saccharomyces cerevisiae, Schizosaccharomyces pombe, Pichia pastoris, Pichia methanolica; insect cell lines, such as those from Spodoptera frugiperda (for example, Sf9 and Sf21 cell lines, and expresSF™ cells (Protein Sciences Corp., Meriden, CT, USA)), Drosophila S2 cells, and Trichoplusia in High Five® Cells (Invitrogen, Carlsbad, CA, USA); and mammalian cells, such as COS1 and COS7 cells, Chinese hamster ovary (CHO) cells, NSO myeloma cells, NIH 3T3 cells, 293 cells, Procell92S, perC6, HEPG2 cells, HeLa cells, L cells, HeLa, MDCK, HEK293, WI38, murine ES cell lines (for example, from strains 129/SV, C57/BL6, DBA-1, 129/SVJ), K562, Jurkat cells, and BW5147. Other useful mammalian cell lines are well known and readily available from the American Type Culture Collection (“ATCC”) (Manassas, VA, USA) and the National Institute of General Medical Sciences (NIGMS) Human Genetic Cell Repository at the Coriell Cell Repositories (Camden, NJ, USA). These cell types are only representative and are not meant to be an exhaustive list.

[0043] Among other considerations, some of which are described above, a host cell strain may be chosen for its ability to process the expressed peptide or fusion protein, or fragment thereof, in the desired fashion. Post-translational modifications of the polypeptide include, but are not limited to, glycosylation, acetylation, carboxylation, phosphorylation, lipidation, and acylation.

[0044] In some embodiments, the cell comprising the one or more vector(s) is present within a composition comprising a pharmaceutically acceptable carrier.

[0045] The present disclosure also provides any of the peptides derived from ATaRIs described herein, or fusion proteins comprising the same, in which the composition comprises at least one nucleic acid molecule encoding at least one of the peptides or fusion proteins. In some embodiments, the composition comprises one peptide or fusion protein in protein form and one or two nucleic acid molecules encoding two peptides or fusion proteins. In some embodiments, the composition comprises two peptides or fusion proteins in protein form, and one nucleic acid molecule encoding one peptide or fusion protein. Thus, the present composition can be a mixture of a protein form of any of the peptides derived from ATaRIs described herein, or fusion proteins comprising the same, and nucleic acid molecule(s) encoding any of the peptides derived from ATaRIs described herein, or fusion proteins comprising the same.

[0046] The present disclosure also provides compositions comprising any one or more of the peptides, fusion proteins, or nucleic acid molecules encoding the same, cells, and/or vectors and a pharmaceutically acceptable carrier. Compositions include, for example, pharmaceutical compositions. A pharmaceutically acceptable carrier refers to at least one component of a pharmaceutical preparation that is normally used for administration of active ingredients. As such, a carrier can contain any pharmaceutical excipient used in the art and any form of vehicle for administration. Carriers include, but are not limited to, phosphate buffered saline, physiological saline, water, citrate/sucrose/Tween formulations and emulsions such as, for example, oil/water emulsions.

[0047] In some embodiments, the pharmaceutical composition further comprises one or more immune checkpoint inhibitors or one or more chemotherapeutic agents, or any combination thereof. In some embodiments, the pharmaceutical composition further comprises one or more immune checkpoint inhibitors. In some embodiments, the pharmaceutical composition further comprises one or more chemotherapeutic agents.

[0048] In some embodiments, the pharmaceutical composition further comprises one or more immune checkpoint inhibitors and one or more chemotherapeutic agents.

[0049] In some embodiments, the immune checkpoint inhibitor comprises a PD-1 checkpoint inhibitor, a PD-L1 checkpoint inhibitor, a CTLA-4 checkpoint inhibitor, a TIGIT checkpoint inhibitor, or a LAG-3 checkpoint inhibitor, or any combination thereof. In some embodiments, the immune checkpoint inhibitor comprises a PD-1 checkpoint inhibitor. In some embodiments, the immune checkpoint inhibitor comprises a PD-L1 checkpoint inhibitor. In some embodiments, the immune checkpoint inhibitor comprises a CTLA-4 checkpoint inhibitor. In some embodiments, the immune checkpoint inhibitor comprises a TIGIT checkpoint inhibitor. In some embodiments, the immune checkpoint inhibitor comprises a LAG-3 checkpoint inhibitor.

[0050] In some embodiments, the PD-1 checkpoint inhibitor comprises nivolumab, pembrolizumab, cetrelimab, or cemiplimab, or any combination thereof. In some embodiments, the PD-1 checkpoint inhibitor comprises nivolumab. In some embodiments, the PD-1 checkpoint inhibitor comprises pembrolizumab. In some embodiments, the PD-1 checkpoint inhibitor comprises cetrelimab. In some embodiments, the PD-1 checkpoint inhibitor comprises cemiplimab.

[0051] In some embodiments, the PD-L1 checkpoint inhibitor comprises atezolizumab, durvalab, or avelumab, or any combination thereof. In some embodiments, the PD-L1 checkpoint inhibitor comprises atezolizumab. In some embodiments, the PD-L1 checkpoint inhibitor comprises durvalab. In some embodiments, the PD-L1 checkpoint inhibitor comprises avelumab

[0052] In some embodiments, the CTLA-4 checkpoint inhibitor comprises ipilumumab or tremelimumab, or a combination thereof. In some embodiments, the CTLA-4 checkpoint inhibitor comprises ipilumumab. In some embodiments, the CTLA-4 checkpoint inhibitor comprises tremelimumab.

[0053] In some embodiments, the chemotherapeutic agent comprises a tyrosine kinase inhibitor (TKI). In some embodiments, the TKI comprises bevacizumab, sunitinib, sorafenib, pazopanib, cabozantinib, lenvatinib, axitinib, or tivozanib, or any combination thereof. In some embodiments, the TKI comprises bevacizumab. In some embodiments, the TKI comprises sunitinib. In some embodiments, the TKI comprises sorafenib. In some embodiments, the TKI comprises pazopanib. In some embodiments, the TKI comprises cabozantinib. In some embodiments, the TKI comprises Lenvatinib. In some embodiments, the TKI comprises axitinib. In some embodiments, the TKI comprises tivozanib.

[0054] In some embodiments, the chemotherapeutic agent comprises a mammalian target of rapamycin (mTOR) inhibitor. In some embodiments, the mTOR inhibitor comprises temsirolimus or everolimus, or a combination thereof. In some embodiments, the mTOR inhibitor comprises temsirolimus. In some embodiments, the mTOR inhibitor comprises everolimus.

[0055] In some embodiments, the pharmaceutical composition is an oral dosage form, an intravenous dosage form, a topical dosage form, an intraperitoneal dosage form, or an intrathecal dosage form. In some embodiments, the pharmaceutical composition is an oral dosage form or an intravenous dosage form. In some embodiments, the pharmaceutical composition is an oral dosage form.

[0056] In some embodiments, the oral dosage form is a pill, tablet, capsule, cachet, gel-cap, pellet, powder, granule, or liquid. In some embodiments, the oral dosage form is a pill, tablet, capsule, gel-cap, or liquid. In some embodiments, the oral dosage form is a pill. In some embodiments, the oral dosage form is a tablet. In some embodiments, the oral dosage form is a capsule. In some embodiments, the oral dosage form is a gel-cap. In some embodiments, the oral dosage form is a liquid.

[0057] In some embodiments, the oral dosage form is protected from light and present within a blister pack, bottle, or intravenous bag. In some embodiments, the oral dosage form is present within a blister pack, bottle, or intravenous bag. In some embodiments, the oral dosage form is present within a blister pack. In some embodiments, the oral dosage form is present within a bottle. In some embodiments, the oral dosage form is present within an intravenous bag.

[0058] The compounds and compositions of the therapeutic vaccines described herein can be formulated for parenteral administration by injection, such as by bolus injection or continuous infusion. The compounds and compositions can be administered by continuous infusion subcutaneously over a period of about 15 minutes to about 24 hours. The compositions can take such forms as suspensions, solutions or emulsions in oily or aqueous vehicles, and can contain formulatory agents such as suspending, stabilizing and/or dispersing agents. In some embodiments, the injectable is in the form of short-acting, depot, or implant and pellet forms injected subcutaneously or intramuscularly. In some embodiments, the parenteral dosage form is the form of a solution, suspension, emulsion, or dry powder.

[0059] For oral administration, the compounds and compositions of the therapeutic vaccines described herein can be formulated by combining the compounds with pharmaceutically acceptable carriers. Such carriers enable the compounds to be formulated as tablets, pills, dragees, capsules, emulsions, liquids, gels, syrups, caches, pellets, powders, granules, slurries, lozenges, aqueous or oily suspensions, and the like, for oral ingestion by a subject to be treated. Pharmaceutical preparations for oral use can be obtained by, for example, adding a solid excipient, optionally grinding the resulting mixture, and processing the mixture of granules, after adding suitable auxiliaries, if desired, to obtain tablets or dragee cores. Suitable excipients include, but are not limited to, fillers such as sugars, including, but not limited to, lactose, sucrose, mannitol, and sorbitol; cellulose preparations including, but not limited to, maize starch, wheat starch, rice starch, potato starch, gelatin, gum tragacanth, methyl cellulose, hydroxypropylmethyl-cellulose, sodium carboxymethylcellulose, and polyvinylpyrrolidone (PVP). If desired, disintegrating agents can be added, including, but not limited to, the cross-linked polyvinyl pyrrolidone, agar, or alginic acid or a salt thereof such as sodium alginate.

[0060] Orally administered compounds and compositions of the therapeutic vaccines can contain one or more optional agents, for example, sweetening agents such as fructose, aspartame or saccharin; flavoring agents such as peppermint, oil of wintergreen, or cherry; coloring agents; and preserving agents, to provide a pharmaceutically palatable preparation. Moreover, when in tablet or pill form, the compositions may be coated to delay disintegration and absorption in the gastrointestinal tract thereby providing a sustained action over an extended period of time. Selectively permeable membranes surrounding an osmotically active driving compound are also suitable for orally administered compounds. Oral compositions can include standard vehicles such as, for example, mannitol, lactose, starch, magnesium stearate, sodium saccharine, cellulose, magnesium carbonate, etc. Such vehicles are suitably of pharmaceutical grade.

[0061] Pharmaceutical preparations which can be used orally include, but are not limited to, push-fit capsules made of gelatin, as well as soft, sealed capsules made of gelatin and a plasticizer, such as glycerol or sorbitol. The push-fit capsules can contain the active ingredients in admixture with filler such as lactose, binders such as starches, and/or lubricants such as talc or magnesium stearate and, optionally, stabilizers. In soft capsules, the active compounds can be dissolved or suspended in suitable liquids, such as fatty oils, liquid paraffin, or liquid polyethylene glycols. In addition, stabilizers can be added.

[0062] In transdermal administration, the compounds and compositions of the therapeutic vaccines can be applied to a plaster, or can be applied by transdermal, therapeutic systems that are consequently supplied to the organism. In some embodiments, the compounds and compositions are present in creams, solutions, powders, fluid emulsions, fluid suspensions, semi-solids, ointments, pastes, gels, jellies, and foams, or in patches containing any of the same.

[0063] The compounds and compositions of the therapeutic vaccines described herein can also be formulated as a depot preparation. Such long acting formulations can be administered by implantation (for example subcutaneously or intramuscularly) or by intramuscular injection. Depot injections can be administered at about 1 to about 6 months or longer intervals. Thus, for example, the compounds and compositions can be formulated with suitable polymeric or hydrophobic materials (for example as an emulsion in an acceptable oil) or ion exchange resins, or as sparingly soluble derivatives, for example, as a sparingly soluble salt.

[0064] In some embodiments, the compounds and compositions of the therapeutic vaccines can be delivered in a controlled release system. In some embodiments, a pump may be used (see Langer, supra; Sefton, CRC Crit. Ref. Biomed. Eng., 1987, 14, 201; Buchwald et al., Surgery, 1980, 88, 507 Saudek et al., N. Engl. J. Med., 1989, 321, 574). In some embodiments, polymeric materials can be used (see Medical Applications of Controlled Release, Langer and Wise (eds.), CRC Pres., Boca Raton, Fla. (1974); Controlled Drug Bioavailability, Drug Product Design and Performance, Smolen and Ball (eds.), Wiley, New York (1984); Ranger et al., J. Macromol. Sci. Rev. Macromol. Chem., 1983, 23, 61; see, also Levy et al., Science, 1985, 228, 190; During et al., Ann. Neurol., 1989, 25, 351; Howard et al., J. Neurosurg., 1989, 71, 105). In some embodiments, a controlled-release system can be placed in proximity of the target of the compounds described herein, such as the liver, thus requiring only a fraction of the systemic dose (see, e.g., Goodson, in Medical Applications of Controlled Release, supra, vol. 2, pp. 115-138 (1984)). Other controlled-release systems discussed in the review by Langer, Science, 1990, 249, 1527-1533) may be used.

[0065] The compounds and compositions of the therapeutic vaccines described herein can be contained in formulations with pharmaceutically acceptable diluents, fillers, disintegrants, binders, lubricants, surfactants, hydrophobic vehicles, water soluble vehicles, emulsifiers, buffers, humectants, moisturizers, solubilizers, preservatives and the like. The pharmaceutical compositions can also comprise suitable solid or gel phase carriers or excipients. Examples of such carriers or excipients include, but are not limited to, calcium carbonate, calcium phosphate, various sugars, starches, cellulose derivatives, gelatin, and polymers such as polyethylene glycols. In some embodiments, the compounds described herein can be used with agents including, but not limited to, topical analgesics (e.g., lidocaine), barrier devices (e.g., GelClair), or rinses (e.g., Caphosol). Pharmaceutical carriers can be liquids, such as water and oils, including those of petroleum, animal, vegetable or synthetic origin, such as peanut oil, soybean oil, mineral oil, sesame oil, and the like. The pharmaceutical carriers can also be saline, gum acacia, gelatin, starch paste, talc, keratin, colloidal silica, urea, and the like. In addition, auxiliary, stabilizing, thickening, lubricating and coloring agents can be used.

[0066] Suitable compositions include, but are not limited to, oral non-absorbed compositions. Suitable compositions also include, but are not limited to saline, water, cyclodextrin solutions, and buffered solutions of pH 3-9.

[0067] The compounds and compositions of the therapeutic vaccines described herein can be formulated with numerous excipients including, but not limited to, purified water, propylene glycol, PEG 400, glycerin, DMA, ethanol, benzyl alcohol, citric acid/sodium citrate (pH3), citric acid/sodium citrate (pH5), tris (hydroxymethyl) amino methane HCl (pH7.0), 0.9% saline, and 1.2% saline, and any combination thereof. In some embodiments, excipient is chosen from propylene glycol, purified water, and glycerin.

[0068] In some embodiments, the compounds and compositions of the therapeutic vaccines described herein can be lyophilized to a solid and reconstituted with, for example, water prior to use.

[0069] When administered to a human, the compounds and compositions of the therapeutic vaccines can be sterile. Water is a suitable carrier when the compound and composition is administered intravenously. Saline solutions and aqueous dextrose and glycerol solutions can also be employed as liquid carriers, particularly for injectable solutions. Suitable pharmaceutical carriers also include excipients such as starch, glucose, lactose, sucrose, gelatin, malt, rice, flour, chalk, silica gel, sodium stearate, glycerol monostearate, talc, sodium chloride, dried skim milk, glycerol, propylene, glycol, water, ethanol and the like. The present compositions, if desired, can also contain minor amounts of wetting or emulsifying agents, or pH buffering agents.

[0070] The compositions of the therapeutic vaccines described herein can take the form of a solution, suspension, emulsion, tablet, pill, pellet, capsule, capsule containing a liquid, powder, sustained-release formulation, aerosol, spray, or any other form suitable for use. Examples of suitable pharmaceutical carriers are described in Remington's Pharmaceutical Sciences, A.R. Gennaro (Editor) Mack Publishing Co.

[0071] In some embodiments, the compounds and compositions of the therapeutic vaccines are formulated in accordance with routine procedures as pharmaceutical compositions adapted for administration to humans. Typically, compounds are solutions in sterile isotonic aqueous buffer. Where necessary, the compositions can also include a solubilizing agent. Compositions for intravenous administration may optionally include a local anesthetic such as lidocaine to ease pain at the site of the injection. Generally, the ingredients are supplied either separately or mixed together in unit dosage form, for example, as a dry lyophilized powder or water free concentrate in a hermetically sealed container such as an ampoule or sachette indicating the quantity of active agent. Where the compound or composition is to be administered by infusion, it can be dispensed, for example, with an infusion bottle containing sterile pharmaceutical grade water or saline. Where the compound or composition is administered by injection, an ampoule of sterile water for injection or saline can be provided so that the ingredients may be mixed prior to administration.

[0072] The pharmaceutical compositions can be in unit dosage form. In such form, the composition can be divided into unit doses containing appropriate quantities of the active component. The unit dosage form can be a packaged preparation, the package containing discrete quantities of the preparations, for example, packeted tablets, capsules, and powders in vials or ampules. The unit dosage form can also be a capsule, cachet, or tablet itself, or it can be the appropriate number of any of these packaged forms.

[0073] In some embodiments, a composition is in the form of a liquid wherein the active agents are present in solution, in suspension, as an emulsion, or as a solution/suspension. In some embodiments, the liquid composition is in the form of a gel. In other embodiments, the liquid composition is aqueous. In other embodiments, the composition is in the form of an ointment.

[0074] Optionally one or more stabilizers can be included in the compositions to enhance chemical stability where required. Suitable stabilizers include, but are not limited to, chelating agents or complexing agents, such as, for example, the calcium complexing agent ethylene diamine tetraacetic acid (EDTA). For example, an appropriate amount of EDTA or a salt thereof, e.g., the disodium salt, can be included in the composition to complex excess calcium ions and prevent gel formation during storage. EDTA or a salt thereof can suitably be included in an amount of about 0.01% to about 0.5%. In those embodiments containing a preservative other than EDTA, the EDTA or a salt thereof, more particularly disodium EDTA, can be present in an amount of about 0.025% to about 0.1% by weight.

[0075] Solid formulations of the compositions for oral administration can contain suitable carriers or excipients, such as corn starch, gelatin, lactose, acacia, sucrose, microcrystalline cellulose, kaolin, mannitol, dicalcium phosphate, calcium carbonate, sodium chloride, or alginic acid. Disintegrators that can be used include, without limitation, microcrystalline cellulose, corn starch, sodium starch glycolate, and alginic acid. Tablet binders that can be used include acacia, methylcellulose, sodium carboxymethylcellulose, polyvinylpyrrolidone (Povidone™), hydroxypropyl methylcellulose, sucrose, starch, and ethylcellulose. Lubricants that can be used include magnesium stearates, stearic acid, silicone fluid, talc, waxes, oils, and colloidal silica. Additional excipients include, for example, colorants, taste-masking agents, solubility aids, suspension agents, compressing agents, enteric coatings, sustained release aids, and the like.

[0076] In some embodiments, the compositions of the therapeutic vaccines can be administered in the form of a depot injection or implant preparation, which can be formulated in such a manner as to permit a sustained release. An exemplary composition comprises any one or more of the compositions described herein formulated in aqueous buffer.

[0077] In some embodiments, liquid formulations of a pharmaceutical composition for oral administration prepared in water or other aqueous vehicles can contain various suspending agents such as methylcellulose, alginates, tragacanth, pectin, kelgin, carrageenan, acacia, polyvinylpyrrolidone, and polyvinyl alcohol. Liquid formulations of pharmaceutical compositions can also include solutions, emulsions, syrups and elixirs containing, together with the active compound(s), wetting agents, sweeteners, and coloring and flavoring agents. Various liquid and powder formulations of the pharmaceutical compositions can be prepared by conventional methods for inhalation into the lungs of the mammal to be treated.

[0078] In some embodiments, liquid formulations of a pharmaceutical composition for injection can comprise various carriers such as vegetable oils, dimethylacetamide, dimethylformamide, ethyl lactate, ethyl carbonate, isopropyl myristate, ethanol, polyols such as, for example, glycerol, propylene glycol, liquid polyethylene glycol, and the like. In some embodiments, the composition includes a citrate/sucrose/tween carrier. For intravenous injections, water soluble versions of the compositions can be administered by the drip method, whereby a pharmaceutical formulation containing the antifungal agent and a physiologically acceptable excipient is infused. Physiologically acceptable excipients can include, for example, 5% dextrose, 0.9% saline, Ringer's solution or other suitable excipients. A suitable insoluble form of the composition can be prepared and administered as a suspension in an aqueous base or a pharmaceutically acceptable oil base, such as an ester of a long chain fatty acid such as, for example, ethyl oleate.

[0079] The compositions of the therapeutic vaccines can be, for example, injectable solutions, aqueous suspensions or solutions, non-aqueous suspensions or solutions, solid and liquid oral formulations, salves, gels, ointments, intradermal patches, creams, aerosols, lotions, tablets, capsules, sustained release formulations, and the like. In some embodiments, for topical applications, the pharmaceutical compositions can be formulated in a suitable ointment. In some embodiments, a topical semi-solid ointment formulation typically comprises a concentration of the active ingredient from about 1 to 20%, or from 5 to 10%, in a carrier, such as a pharmaceutical cream base. Some examples of formulations of a composition for topical use include, but are not limited to, drops, tinctures, lotions, creams, solutions, and ointments containing the active ingredient and various supports and vehicles.

[0080] In some embodiments, any of the peptides or fusion proteins, or vectors encoding the same, or cells described herein, or compositions comprising the same, can be administered to a mammal as an aerosol. In some embodiments, the aerosol inocula comprises saline. Conventional aerosol delivery devices include, but are not limited to, a pressurized metered dose inhaler (pMDI) and a dry power inhaler (DPI), both of which deliver a dry powder formulation, and nebulizers such as the PARI eFlow device, which delivers an aqueous dose as a fine mist. In some embodiments, the aerosol delivery device is a Pari eFlow portable electronic aerosol delivery platform attached to a delivery mask. In some embodiments, the average particle size is from about 1 μm to about 10 μm, from about 1 μm to about 5 μm, from about 3 μm to about 5 μm, from about 4 μm to about 5 μm, or from about 3.9 μm to about 4.9 μm. In some embodiments, the aerosol is in a volume from about 0.1 ml to about 5 ml, from about 0.1 ml to about 2 ml, from about 0.1 ml to about 1.5 ml, from about 0.5 ml to about 1.5 ml, from about 0.5 ml to about 1.2 ml, from about 0.7 ml to about 1.2 ml, or about 1 ml.

[0081] The compositions of the therapeutic vaccines can further comprise a pharmaceutically acceptable excipient. The pharmaceutically acceptable excipient can be functional molecules as vehicles, adjuvants, carriers, or diluents. The pharmaceutically acceptable excipient can be a transfection facilitating agent, which can include surface active agents, such as immune-stimulating complexes (ISCOMS), Freund's incomplete adjuvant, LPS analog including monophosphoryl lipid A, muramyl peptides, quinone analogs, vesicles such as squalene and squalane, hyaluronic acid, lipids, liposomes, calcium ions, viral proteins, polyanions, polycations, or nanoparticles, or other known transfection facilitating agents. The transfection facilitating agent is a polyanion, polycation, including poly-L-glutamate (LGS), or lipid. The transfection facilitating agent is poly-L-glutamate, and more suitably, the poly-L-glutamate is present in the composition at a concentration less than 6 mg/ml. The transfection facilitating agent can also include surface active agents such as immune-stimulating complexes (ISCOMS), Freunds incomplete adjuvant, LPS analog including monophosphoryl lipid A, muramyl peptides, quinone analogs and vesicles such as squalene and squalane, and hyaluronic acid can also be used administered in conjunction with the genetic construct. In some embodiments, the plasmid compositions can also include a transfection facilitating agent such as lipids, liposomes, including lecithin liposomes or other liposomes known in the art, as a DNA-liposome mixture (see for example W09324640), calcium ions, viral proteins, polyanions, polycations, or nanoparticles, or other known transfection facilitating agents. In some embodiments, the transfection facilitating agent is a polyanion, polycation, including poly-L-glutamate (LGS), or lipid. Concentration of the transfection agent in the composition is less than 4 mg/ml, less than 2 mg/ml, less than 1 mg/ml, less than 0.750 mg/ml, less than 0.500 mg/ml, less than 0.250 mg/ml, less than 0.100 mg/ml, less than 0.050 mg/ml, or less than 0.010 mg/ml.

[0082] The pharmaceutically acceptable excipient may be an adjuvant. The adjuvant may be other genes that are expressed in alternative plasmid or are delivered as proteins in combination with the plasmid above. The adjuvant may be selected from the group consisting of: a-interferon (IFN-α), β-interferon (IFN-β), γ-interferon, platelet derived growth factor (PDGF), TNFα, TNFβ, GM-CSF, epidermal growth factor (EGF), cutaneous T cell-attracting chemokine (CTACK), epithelial thymus-expressed chemokine (TECK), mucosae-associated epithelial chemokine (MEC), IL-12, IL-15, MHC, CD80,CD86 including IL-15 having the signal sequence deleted and optionally including the signal peptide from IgE. The adjuvant may be IL-12, IL-15, IL-28, CTACK, TECK, platelet derived growth factor (PDGF), TNFα, TNFβ, GM-CSF, epidermal growth factor (EGF), IL-1, IL-2, IL-4, IL-5, IL-6, IL-10, IL-12, IL-18, or a combination thereof.

[0083] Other genes which may be useful adjuvants include those encoding: MCP-1, MIP-la, MIP-1p, IL-8, L-selectin, P-selectin, E-selectin, CD34, GlyCAM-1, MadCAM-1, LFA-1, VLA-1, Mac-1, pl50.95, PECAM, ICAM-1, ICAM-2, ICAM-3, CD2, LFA-3, M-CSF, G-CSF, IL-4, mutant forms of IL-18, CD40, CD40L, vascular growth factor, fibroblast growth factor, IL-7, nerve growth factor, vascular endothelial growth factor, Fas, TNF receptor, Flt, Apo-1, p55, WSL-1, DR3, TRAMP, Apo-3, AIR, LARD, NGRF, DR4, DR5, KILLER, TRAIL-R2, TRICK2, DR6, Caspase ICE, Fos, c-jun, Sp-1, Ap-1, Ap-2, p38, p65Rel, MyD88, IRAK, TRAF6, IkB, Inactive NIK, SAP K, SAP-1, JNK, interferon response genes, NFkB, Bax, TRAIL, TRAILrec, TRAILrecDRC5, TRAIL-R3, TRAIL-R4, RANK, RANK LIGAND, Ox40, Ox40 LIGAND, NKG2D, MICA, MICB, NKG2A, NKG2B, NKG2C, NKG2E, NKG2F, TAP1, TAP2 and functional fragments thereof.

[0084] The present disclosure also provides kits comprising any of the peptides or fusion proteins, nucleic acid molecules, vectors, or cells, described herein. The kit can include, for example, container(s), package(s) or dispenser(s) along with labels and instructions for administration or use.

[0085] The present disclosure also provides methods of treating a subject having cancer, wherein the subject comprises one or more deleterious mutations in the SETD2 gene, the methods comprising administering to the subject one or more peptides derived from ATaRIs and/or one or more mRNA molecules encoding peptides derived from ATaRIs.

[0086] The present disclosure also provides methods of immunizing a subject against cancer or eliciting an immune response to one or more peptides derived from ATaRIs in a subject, wherein the subject comprises one or more deleterious mutations in the SETD2 gene, the methods comprising administering to the subject one or more peptides derived from ATaRIs and/or one or more mRNA molecules encoding peptides derived from ATaRIs.

[0087] In some embodiments, the methods further comprising analyzing a biological sample obtained from the subject for the presence of the one or more deleterious mutations in the SETD2 gene.

[0088] In some embodiments, the amino acid sequence of the one or more peptides derived from ATaRI are selected from the group consisting of SEQ ID NOs: 1-8675. In some embodiments, two or more peptides are in the form of a fusion protein as described herein.

[0089] In some embodiments, the cancer is SETD2-mutant liver cancer, mesothelioma, lung cancer, or kidney cancer. In some embodiments, the cancer is SETD2-mutant liver cancer. In some embodiments, the cancer is SETD2-mutant mesothelioma. In some embodiments, the cancer is SETD2-mutant lung cancer. In some embodiments, the cancer is SETD2-mutant kidney cancer. In some embodiments, the kidney cancer is clear cell renal cell carcinoma or papillary renal cell carcinoma. In some embodiments, the kidney cancer is clear cell renal cell carcinoma. In some embodiments, the kidney cancer is papillary renal cell carcinoma.

[0090] In some embodiments, the biological sample is a tumor sample.

[0091] In some embodiments, the presence of the one or more deleterious mutations in the SETD2 gene is detected by nucleic acid sequencing. In some embodiments, the nucleic acid sequencing is RNA sequencing.

[0092] In some embodiments, the methods further comprise administering to the subject one or more immune checkpoint inhibitors or one or more chemotherapeutic agents, or any combination thereof. In some embodiments, the one or more immune checkpoint inhibitors or one or more chemotherapeutic agents, or any combination thereof, may be present in the same pharmaceutical composition containing the peptide(s) or fusion protein(s), or vectors encoding the same. In some embodiments, the one or more immune checkpoint inhibitors or one or more chemotherapeutic agents, or any combination thereof, may be present in separate pharmaceutical compositions than the pharmaceutical compositions containing the peptide(s) or fusion protein(s), or vectors encoding the same.

[0093] In some embodiments, the immune checkpoint inhibitor comprises a PD-1 checkpoint inhibitor, a PD-L1 checkpoint inhibitor, a CTLA-4 checkpoint inhibitor, a TIGIT checkpoint inhibitor, or a LAG-3 checkpoint inhibitor, or any combination thereof. In some embodiments, the immune checkpoint inhibitor comprises a PD-1 checkpoint inhibitor. In some embodiments, the immune checkpoint inhibitor comprises a PD-L1 checkpoint inhibitor. In some embodiments, the immune checkpoint inhibitor comprises a CTLA-4 checkpoint inhibitor. In some embodiments, the immune checkpoint inhibitor comprises a TIGIT checkpoint inhibitor. In some embodiments, the immune checkpoint inhibitor comprises a LAG-3 checkpoint inhibitor.

[0094] In some embodiments, the PD-1 checkpoint inhibitor comprises nivolumab, pembrolizumab, cetrelimab, or cemiplimab, or any combination thereof. In some embodiments, the PD-1 checkpoint inhibitor comprises nivolumab. In some embodiments, the PD-1 checkpoint inhibitor comprises pembrolizumab. In some embodiments, the PD-1 checkpoint inhibitor comprises cetrelimab. In some embodiments, the PD-1 checkpoint inhibitor comprises cemiplimab.

[0095] In some embodiments, the PD-L1 checkpoint inhibitor comprises atezolizumab, durvalab, or avelumab, or any combination thereof. In some embodiments, the PD-L1 checkpoint inhibitor comprises atezolizumab. In some embodiments, the PD-L1 checkpoint inhibitor comprises durvalab. In some embodiments, the PD-L1 checkpoint inhibitor comprises avelumab.

[0096] In some embodiments, the CTLA-4 checkpoint inhibitor comprises ipilumumab or tremelimumab, or a combination thereof. In some embodiments, the CTLA-4 checkpoint inhibitor comprises ipilumumab. In some embodiments, the CTLA-4 checkpoint inhibitor comprises tremelimumab.

[0097] In some embodiments, the chemotherapeutic agent comprises a tyrosine kinase inhibitor (TKI). In some embodiments, the TKI comprises bevacizumab, sunitinib, sorafenib, pazopanib, cabozantinib, lenvatinib, axitinib, or tivozanib, or any combination thereof. In some embodiments, the TKI comprises bevacizumab. In some embodiments, the TKI comprises sunitinib. In some embodiments, the TKI comprises sorafenib. In some embodiments, the TKI comprises pazopanib. In some embodiments, the TKI comprises cabozantinib. In some embodiments, the TKI comprises lenvatinib. In some embodiments, the TKI comprises axitinib. In some embodiments, the TKI comprises tivozanib.

[0098] In some embodiments, the chemotherapeutic agent comprises a mammalian target of rapamycin (mTOR) inhibitor. In some embodiments, the mTOR inhibitor comprises temsirolimus or everolimus, or a combination thereof. In some embodiments, the mTOR inhibitor comprises temsirolimus. In some embodiments, the mTOR inhibitor comprises everolimus.

[0099] In some embodiments, the methods further comprise administering another immunotherapy to the subject. In some embodiments, the another immunotherapy comprises chimeric antigen receptor-T cells (CAR-T), bone marrow transplant, adoptive transfer, interleukin-2, or interferon, or any combination thereof. In some embodiments, the another immunotherapy comprises chimeric antigen receptor-T cells (CAR-T). In some embodiments, the another immunotherapy comprises bone marrow transplant. In some embodiments, the another immunotherapy comprises adoptive transfer. In some embodiments, the another immunotherapy comprises interleukin-2.

[0100] The compounds and compositions described herein can be administered by any route of administration including, but not limited to, oral, intravenous, topical, intraperitoneal, and intrathecal. In some embodiments, the administration is oral, intravenous, intraperitoneal, or intrathecal. In some embodiments, the administration is oral, intravenous, or intraperitoneal. In some embodiments, the administration is oral or intravenous. In some embodiments, the administration is oral or topical. In some embodiments, the administration is oral or intraperitoneal. In some embodiments, the administration is oral or intrathecal. The route of administration can depend on the particular disease, disorder, or condition being treated and can be selected or adjusted by the clinician according to methods known to the clinician to obtain desired clinical responses. Methods for administration are known in the art and one skilled in the art can refer to various pharmacologic references for guidance (see, for example, Modern Pharmaceutics, Banker & Rhodes, Marcel Dekker, Inc. (1979); and Goodman & Gilman's The Pharmaceutical Basis of Therapeutics, 6th Edition, MacMillan Publishing Co., New York (1980)).

[0101] In some embodiments, it may be desirable to administer one or more compounds, or a pharmaceutically acceptable salt thereof, or composition(s) comprising the same to a particular area in need of treatment. This may be achieved, for example, by local infusion (for example, during surgery), topical application (for example, with a wound dressing after surgery), or by injection (for example, by depot injection). Formulations for injection can be presented in unit dosage form, such as in ampoules or in multi-dose containers, with an added preservative.

[0102] In some embodiments, the compounds and compositions described herein can be delivered in a vesicle, in particular a liposome (see, Langer, Science, 1990, 249, 1527-1533; Treat et al., in Liposomes in the Therapy of Infectious Disease and Cancer, Lopez-Berestein and Fidler (eds.), Liss, New York, pp. 353-365 (1989); Lopez-Berestein, ibid., pp. 317-327; see generally ibid.).

[0103] The amount of any particular compound to be administered may be that amount which is therapeutically effective. The dosage to be administered may depend on the characteristics of the subject being treated, e.g., the particular animal treated, age, weight, health, types of concurrent treatment, if any, and frequency of treatments, and on the nature and extent of the disease, condition, or disorder, and can be easily determined by one skilled in the art (e.g., by the clinician). The selection of the specific dose regimen can be selected or adjusted or titrated by the clinician according to methods known to the clinician to obtain the desired clinical response. In addition, in vitro or in vivo assays may optionally be employed to help identify optimal dosage ranges. The precise dose to be employed in the compositions may also depend on the route of administration, and should be decided according to the judgment of the practitioner and each patient's circumstances.

[0104] Effective doses of the compositions of the present disclosure, for the treatment of a condition vary depending upon many different factors, including means of administration, target site, physiological state of the subject, whether the subject is human or an animal, other medications administered, and whether treatment is prophylactic or therapeutic. Usually, the subject is a human but non-human mammals including transgenic mammals can also be treated.

[0105] In some embodiments, the compositions can be administered to a subject by injection intravenously, subcutaneously, intraperitoneally, intramuscularly, intramedullarily, intraventricularly, intraepidurally, intraarterially, intravascularly, intraarticularly, intrasynovially, intrasternally, intrathecally, intrahepatically, intraspinally, intratumorly, intracranially, enteral, intrapulmonary, transmucosal, intrauterine, sublingual, or locally at sites of inflammation or tumor growth by using standard methods. In some embodiments, the compositions can be administered to a subject by injection intravenously. Alternately, the compositions can be administered to a subject by routes including oral, nasal, ophthalmic, rectal, or topical. The most typical route of administration is intravascular, subcutaneous, or intramuscular, although other routes can be effective. In some embodiments, compositions are administered as a sustained release composition or device, such as a Medipad™ device. The composition can also be administered via the respiratory tract, for example, using a dry powder inhalation device, nebulizer, or a metered dose inhaler. The composition can also be administered by traditional syringes, needleless injection devices, “microprojectile bombardment gone guns,” or other physical methods such as electroporation (“EP”), “hydrodynamic method”, or ultrasound.

[0106] In some embodiments, the composition can be administered to a subject by sustained release administration, by such means as depot injections of erodible implants directly applied during surgery or by implantation of an infusion pump or a biocompatible sustained release implant into the subject. Alternately, the composition can be administered to a subject by injectable depot routes of administration, such as by using 1-, 3-, or 6-month depot injectable or biodegradable materials and methods, or by applying to the skin of the subject a transdermal patch containing the composition, and leaving the patch in contact with the subject's skin, generally for 1 to 5 hours per patch.

[0107] In some embodiments, the compositions comprise about 1 nanogram to about 10 mg of nucleic acid molecule or peptide or fusion protein. In some embodiments, the compositions comprise: 1) at least 10, 15, 20, 25, 30, 35, 40, 45, 50, 55, 60, 65, 70, 75, 80, 85, 90, 95 or 100 nanograms, or at least 1, 5, 10, 15, 20, 25, 30, 35, 40, 45, 50, 55, 60, 65, 70, 75, 80, 85, 90, 95,100, 105, 110, 115, 120, 125, 130, 135, 140, 145, 150, 155, 160, 165, 170, 175, 180, 185, 190, 195, 200, 205, 210, 215, 220, 225, 230, 235, 240, 245, 250, 255, 260, 265, 270, 275, 280, 285, 290, 295, 300, 305, 310, 315, 320, 325, 330, 335, 340, 345, 350, 355, 360, 365, 370, 375, 380, 385, 390, 395, 400, 405, 410, 415, 420, 425, 430, 435, 440, 445, 450, 455, 460, 465, 470, 475, 480, 485, 490, 495, 500, 605, 610, 615, 620, 625, 630, 635, 640, 645, 650, 655, 660, 665, 670, 675, 680, 685, 690, 695, 700, 705, 710, 715, 720, 725, 730, 735, 740, 745, 750, 755, 760, 765, 770, 775, 780, 785, 790, 795, 800, 805, 810, 815, 820, 825, 830, 835, 840, 845, 850, 855, 860, 865, 870, 875, 880, 885, 890, 895. 900, 905, 910, 915, 920, 925, 930, 935, 940, 945, 950, 955, 960, 965, 970, 975, 980, 985, 990, 995 or 1000 micrograms, or at least 1.5, 2, 2.5, 3, 3.5, 4, 4.5, 5, 5.5, 6, 6.5, 7, 7.5, 8, 8.5, 9, 9.5 or 10 mg or more; and 2) up to and including 15, 20, 25, 30, 35, 40, 45, 50, 55, 60, 65, 70, 75, 80, 85, 90, 95 or 100 nanograms, or up to and including 1, 5, 10, 15, 20, 25, 30, 35, 40, 45, 50, 55, 60, 65, 70, 75, 80, 85, 90, 95,100, 105, 110, 115, 120, 125, 130, 135, 140, 145, 150, 155, 160, 165, 170, 175, 180, 185, 190, 195, 200, 205, 210, 215, 220, 225, 230, 235, 240, 245, 250, 255, 260, 265, 270, 275, 280, 285, 290, 295, 300, 305, 310, 315, 320, 325, 330, 335, 340, 345, 350, 355, 360, 365, 370, 375, 380, 385, 390, 395, 400, 405, 410, 415, 420, 425, 430, 435, 440, 445, 450, 455, 460, 465, 470, 475, 480, 485, 490, 495, 500, 605, 610, 615, 620, 625, 630, 635, 640, 645, 650, 655, 660, 665, 670, 675, 680, 685, 690, 695, 700, 705, 710, 715, 720, 725, 730, 735, 740, 745, 750, 755, 760, 765, 770, 775, 780, 785, 790, 795, 800, 805, 810, 815, 820, 825, 830, 835, 840, 845, 850, 855, 860, 865, 870, 875, 880, 885, 890, 895. 900, 905, 910, 915, 920, 925, 930, 935, 940, 945, 950, 955, 960, 965, 970, 975, 980, 985, 990, 995, or 1000 micrograms, or up to and including 1.5, 2, 2.5, 3, 3.5, 4, 4.5, 5, 5.5, 6, 6.5, 7, 7.5, 8, 8.5, 9, 9.5 or 10 mg.

[0108] In some embodiments, the compositions comprise about 5 ng to about 10 mg of nucleic acid molecule or peptide or fusion protein. In some embodiments, the compositions comprise about 25 ng to about 5 mg of nucleic acid molecule or peptide or fusion protein. In some embodiments, the compositions contain about 50 ng to about 1 mg of nucleic acid molecule or peptide or fusion protein. In some embodiments, the compositions contain about 0.1 to about 500 μg of nucleic acid molecule or peptide or fusion protein. In some embodiments, the compositions contain about 1 μg to about 350 μg of nucleic acid molecule or peptide or fusion protein. In some embodiments, the compositions contain about 5 μg to about 250 μg of nucleic acid molecule or peptide or fusion protein. In some embodiments, the compositions contain about 10 μg to about 200 μg of nucleic acid molecule or peptide or fusion protein. In some embodiments, the compositions contain about 15 μg to about 150 μg of nucleic acid molecule or peptide or fusion protein. In some embodiments, the compositions contain about 20 μg to about 100 μg of nucleic acid molecule or peptide or fusion protein. In some embodiments, the compositions contain about 25 μg to about 75 μg of nucleic acid molecule or peptide or fusion protein. In some embodiments, the compositions contain about 30 μg to about 50 μg of nucleic acid molecule or peptide or fusion protein. In some embodiments, the compositions contain about 35 μg to about 40 μg of nucleic acid molecule or peptide or fusion protein. In some embodiments, the compositions contain about 100 μg to about 200 μg of nucleic acid molecule or peptide or fusion protein. In some embodiments, the compositions comprise about 10 μg to about 100 μg of nucleic acid molecule or peptide or fusion protein. In some embodiments, the compositions comprise about 20 μg to about 80 μg of nucleic acid molecule or peptide or fusion protein. In some embodiments, the compositions comprise about 25 μg to about 60 μg of nucleic acid molecule or peptide or fusion protein. In some embodiments, the compositions comprise about 30 ng to about 50 μg of nucleic acid molecule or peptide or fusion protein. In some embodiments, the compositions comprise about 35 ng to about 45 μg of nucleic acid molecule or peptide or fusion protein. In some embodiments, the compositions contain about 0.1 μg to about 500 μg of nucleic acid molecule or peptide or fusion protein. In some embodiments, the compositions contain about 1 μg to about 350 μg of nucleic acid molecule or peptide or fusion protein. In some embodiments, the compositions contain about 25 μg to about 250 μg of nucleic acid molecule or peptide or fusion protein. In some embodiments, the compositions contain about 100 μg to about 200 μg of nucleic acid molecule or peptide or fusion protein.

[0109] In some embodiments, the delivery platforms described herein can be used either in a single administration alone or in combinations as matched peptide/fusion protein prime-boost approaches. For example, the same peptide/fusion protein can be used as both the prime and the boost. In other embodiments, a first peptide/fusion protein can be used as the prime and a second different peptide/fusion protein can be used as the boost (i.e., heterologous prime-boost). In some embodiments, the prime is a DNA or RNA (such as mRNA) prime and the boost is a viral vector boost. In some embodiments, the prime is a viral vector prime and the boost is a DNA or RNA (such as mRNA) boost.

[0110] In order that the subject matter disclosed herein may be more efficiently understood, examples are provided below. It should be understood that these examples are for illustrative purposes only and are not to be construed as limiting the claimed subject matter in any manner. Throughout these examples, molecular cloning reactions, and other standard recombinant DNA techniques, were carried out according to methods described in Maniatis et al., Molecular Cloning—A Laboratory Manual, 2nd ed., Cold Spring Harbor Press (1989), using commercially available reagents, except where otherwise noted.

### EXAMPLES

### Example 1: Detection of Human Neoantigens

[0111] De-duplicated mapped reads for 11 SETD2-mutant and 21 SETD2-wt Renal Cell Carcinoma samples published (Simon et al., Genome Research, 2014, 24, 241-250) were imported into SeqMonk v1.48 (SeqMonk (RRID: SCR_001913), Babraham Institute, see, world wide web at “bioinformatics.babraham.ac.uk/projects/seqmonk/”). Reads were visualized against an annotated genome hg19. The presence of reads in the inter-genic regions suggested presence of DNA-contamination in RNA sequencing data. Percentage of reads mapped in gene regions were fluctuation between 50 to 75%, as was measured by SeqMonk. From NIH The database of Genotypes and Phenotypes (dbGaP) were obtained publicly available dataset of RNAseq data for dbGaP Study Accession: phs001287. Files for 10 SETD2-mutant and 34 SETD2-wt Renal Cell Carcinoma samples (number of sequencing files per sample fluctuated between 1 to 4, in total 110 files were used) were subset for subsequent analysis. In addition to publicly available data, RNA-sequensing for 10 SETD2-mutant and 34 SETD2-wt Renal Cell Carcinoma samples collected from patients who underwent treatment (Ilumina® Stranded Total RNA Prep, Ligation with Ribo-Zero Plus, 20040529, was used for library preparation, paeired reads, 150 bp long) was performed.

[0112] Reads were aligned to the human genome (GENCODE, hg38) containing intronic sequences. Transcript expression was quantified with eXpress following a published protocol (Pimentel et al., Nucleic Acid Res., 2016, 44, 838-851). KMA was implemented to identify genomic loci and level of intron retention (Smart et al., Nature Biotechnol., 2018, 36, 1056-1063). Intron was considered retained, if was detected by 5 unique reads; level of retention was in range 0 to 1, as ratue to expression of corresponding protein coding transcripts. Introns detected in more than 5 patients out of 10 SETD2 mutant samples in CPTAC3 or FCCC dataset, not detected in any control SETD2-wt specimens are the basis for the development of the therapeutic vaccine. Nucleotide sequences corresponding to the intronic regions and short fragments of the previous exonic sequences and the open reading frame were used to in silico translate peptide sequences derived from aberrantly retained introns into candidate neoantigen peptide sequences (Smart et al., Nature Biotechnol., 2018, 36, 1056-1063). This process resulted in 8675 short peptide sequences (SEQ ID NOs: 1-8675), which are the basis for the new vaccine for treatment of SETD2-mutant tumors.

[0113] Various modifications of the described subject matter, in addition to those described herein, will be apparent to those skilled in the art from the foregoing description. Such modifications are also intended to fall within the scope of the appended claims. Each reference (including, but not limited to, journal articles, U.S. and non-U.S. patents, patent application publications, international patent application publications, gene bank accession numbers, and the like) cited in the present application is incorporated herein by reference in its entirety.

The application's sequence listing, which the Patent Office published only in electronic form, follows.

SEQUENCE LISTING (8675 sequences)

SEQ ID NO: 1 - protein, 33 aa, synthetic construct
  REGION 1..33: note = ATaRI peptide
AELSEDDQVNHVNILNISYLPILNSHLRQPKFR

SEQ ID NO: 2 - protein, 9 aa, synthetic construct
  REGION 1..9: note = ATaRI peptide
DVLYIPMYW

SEQ ID NO: 3 - protein, 25 aa, synthetic construct
  REGION 1..25: note = ATaRI peptide
ITVNFWYKVNMVCFFCFFQMELALG

SEQ ID NO: 4 - protein, 20 aa, synthetic construct
  REGION 1..20: note = ATaRI peptide
EALGNPQEVGDCPKVAQWVG

SEQ ID NO: 5 - protein, 24 aa, synthetic construct
  REGION 1..24: note = ATaRI peptide
GVIKVKTEVSAALSQVLVFLLSLV

SEQ ID NO: 6 - protein, 98 aa, synthetic construct
  REGION 1..98: note = ATaRI peptide
VPPCVQPTVCHGPSTAPTHPSLCPRSTQPQLHPQCPAHPSQLTLLGRACPGFHGNLEPRTISRGMSVTQTKPPWSTPRHKGRPMLRTNPNPNPETVGS

SEQ ID NO: 7 - protein, 24 aa, synthetic construct
  REGION 1..24: note = ATaRI peptide
GKNNLSNVVCVRIIELALLLLCHI

SEQ ID NO: 8 - protein, 18 aa, synthetic construct
  REGION 1..18: note = ATaRI peptide
SDSWEPTSGRIKIKFMDF

SEQ ID NO: 9 - protein, 27 aa, synthetic construct
  REGION 1..27: note = ATaRI peptide
NIRDWNTKVMLLKTSLFIFYIALQFDS

SEQ ID NO: 10 - protein, 9 aa, synthetic construct
  REGION 1..9: note = ATaRI peptide
VPNASNLQV

SEQ ID NO: 11 - protein, 31 aa, synthetic construct
  REGION 1..31: note = ATaRI peptide
LHLELEKQVSSARRSQRVHRSITVISLLTID

SEQ ID NO: 12 - protein, 36 aa, synthetic construct
  REGION 1..36: note = ATaRI peptide
DDYILDLQSKGQSVIIIIKCQLDVKYFRKWGKDFNK

SEQ ID NO: 13 - protein, 41 aa, synthetic construct
  REGION 1..41: note = ATaRI peptide
ENEATMCQVWSEAMMGKGHGRTSQGPGMQAAFPFWQGTGVG

SEQ ID NO: 14 - protein, 50 aa, synthetic construct
  REGION 1..50: note = ATaRI peptide
RLEETKWEVGQTRRGREQGHTGRNPGKRGPAPPSLSLPPPEVLPFLTSVR

SEQ ID NO: 15 - protein, 65 aa, synthetic construct
  REGION 1..65: note = ATaRI peptide
RASESDGKRKCSLSPAGGVLEWGSEKEACLETVCPGAVNVLGSVEVQVHRAQGRLGGGMSGWGCV

SEQ ID NO: 16 - protein, 9 aa, synthetic construct
  REGION 1..9: note = ATaRI peptide
SRNIVQNYR

SEQ ID NO: 17 - protein, 24 aa, synthetic construct
  REGION 1..24: note = ATaRI peptide
VDMDDKDDVSVGAVHVFMWLDTPF

SEQ ID NO: 18 - protein, 45 aa, synthetic construct
  REGION 1..45: note = ATaRI peptide
RDFITALPGMSTSVCKPLICYDDKRTRSPAIYLSLKVFIGLIFTN

SEQ ID NO: 19 - protein, 9 aa, synthetic construct
  REGION 1..9: note = ATaRI peptide
RGLAERRGW

SEQ ID NO: 20 - protein, 9 aa, synthetic construct
  REGION 1..9: note = ATaRI peptide
SGSSDNTIR

SEQ ID NO: 21 - protein, 9 aa, synthetic construct
  REGION 1..9: note = ATaRI peptide
RIVSGAYDG

SEQ ID NO: 22 - protein, 9 aa, synthetic construct
  REGION 1..9: note = ATaRI peptide
PEDCAAAGR

SEQ ID NO: 23 - protein, 22 aa, synthetic construct
  REGION 1..22: note = ATaRI peptide
LEQFEKSEGEGTWVVLLQLFFW

SEQ ID NO: 24 - protein, 9 aa, synthetic construct
  REGION 1..9: note = ATaRI peptide
SPPHKRWRR

SEQ ID NO: 25 - protein, 24 aa, synthetic construct
  REGION 1..24: note = ATaRI peptide
ICFEMRLSGRCLDISPFTIPGASV

SEQ ID NO: 26 - protein, 9 aa, synthetic construct
  REGION 1..9: note = ATaRI peptide
IDLLESFVR

SEQ ID NO: 27 - protein, 12 aa, synthetic construct
  REGION 1..12: note = ATaRI peptide
FEIDPHLQVCLE

SEQ ID NO: 28 - protein, 51 aa, synthetic construct
  REGION 1..51: note = ATaRI peptide
QPRRLSGKGGSHHSAFHQPSSFLFPRAWFPVSLGWVSNKNNPFNSLFPGMI

SEQ ID NO: 29 - protein, 15 aa, synthetic construct
  REGION 1..15: note = ATaRI peptide
EDLTSPEEVSLFDFS

SEQ ID NO: 30 - protein, 58 aa, synthetic construct
  REGION 1..58: note = ATaRI peptide
TEDVSFMKVGWAQDQAGGTQRAISKLRSAVSCTCSSHALTFGASMHGFKSTCLLFLAL

SEQ ID NO: 31 - protein, 22 aa, synthetic construct
  REGION 1..22: note = ATaRI peptide
ALTGEGVQVRLQEGLATWQHDS

SEQ ID NO: 32 - protein, 30 aa, synthetic construct
  REGION 1..30: note = ATaRI peptide
YFENTDILVSTPSDALIHSIFCHVLETWTL

SEQ ID NO: 33 - protein, 96 aa, synthetic construct
  REGION 1..96: note = ATaRI peptide
ITMSAPGMSKMGKPFHPGEACDTGWRSQPHSAFGWEVGPTFYSHASQTALLDCCKPRRTTLVPRTSVHPRFGVESYFHFINTCQALVFNVRHSVGC

SEQ ID NO: 34 - protein, 10 aa, synthetic construct
  REGION 1..10: note = ATaRI peptide
ILDETDLYSK

SEQ ID NO: 35 - protein, 45 aa, synthetic construct
  REGION 1..45: note = ATaRI peptide
AMHRFLATGKCSLSQFEISTNPEACFSPTTDWGGLGVDTGKWGDK

SEQ ID NO: 36 - protein, 24 aa, synthetic construct
  REGION 1..24: note = ATaRI peptide
VMALTASPGMFGSQPHRAGPRVRK

SEQ ID NO: 37 - protein, 10 aa, synthetic construct
  REGION 1..10: note = ATaRI peptide
KFEILSVEVC

SEQ ID NO: 38 - protein, 28 aa, synthetic construct
  REGION 1..28: note = ATaRI peptide
IGDEVKCRVSLLKGLLGFWLDGKKAVLN

SEQ ID NO: 39 - protein, 27 aa, synthetic construct
  REGION 1..27: note = ATaRI peptide
ERVFYTGQVTLPLDRSPLPLVTPQTQI

SEQ ID NO: 40 - protein, 38 aa, synthetic construct
  REGION 1..38: note = ATaRI peptide
LVNRKARKVSLLLTSISMVSHDVPFNPTPVQGFQLRCL

SEQ ID NO: 41 - protein, 31 aa, synthetic construct
  REGION 1..31: note = ATaRI peptide
GGRDMKTFKYGGSGGGLASREIVVVVGGLGK

SEQ ID NO: 42 - protein, 16 aa, synthetic construct
  REGION 1..16: note = ATaRI peptide
TVTCFLKKVSSFATRQ

SEQ ID NO: 43 - protein, 9 aa, synthetic construct
  REGION 1..9: note = ATaRI peptide
DFVPQKVVR

SEQ ID NO: 44 - protein, 38 aa, synthetic construct
  REGION 1..38: note = ATaRI peptide
YAKSEKFQVGGWATDELLGVPGPQSQRRAPGVLGPVLL

SEQ ID NO: 45 - protein, 13 aa, synthetic construct
  REGION 1..13: note = ATaRI peptide
FYYENNLWVSIFC

SEQ ID NO: 46 - protein, 11 aa, synthetic construct
  REGION 1..11: note = ATaRI peptide
EEETENSLVSI

SEQ ID NO: 47 - protein, 13 aa, synthetic construct
  REGION 1..13: note = ATaRI peptide
LAQSQHAQVTAAA

SEQ ID NO: 48 - protein, 24 aa, synthetic construct
  REGION 1..24: note = ATaRI peptide
QDRDKIKQVNMQVSLFSFRFKIFE

SEQ ID NO: 49 - protein, 38 aa, synthetic construct
  REGION 1..38: note = ATaRI peptide
LVKMYRSKVRRISGPLHNFYFYINYRKVISKIEFFFLP

SEQ ID NO: 50 - protein, 9 aa, synthetic construct
  REGION 1..9: note = ATaRI peptide
RLEAMKLNE

SEQ ID NO: 51 - protein, 52 aa, synthetic construct
  REGION 1..52: note = ATaRI peptide
SKGQLKTKGKVNPMKVLSCRLYMQEIWNLVKDAGWFAFCCQQTSNYLIQVWV

SEQ ID NO: 52 - protein, 47 aa, synthetic construct
  REGION 1..47: note = ATaRI peptide
HLANTYISVSSSAFNSFFKKFQLEGNYTLLTFTWKSSFQTYSLNLVC

SEQ ID NO: 53 - protein, 24 aa, synthetic construct
  REGION 1..24: note = ATaRI peptide
AVCPLLHCVSSTWAGGGDWHSVTP

SEQ ID NO: 54 - protein, 13 aa, synthetic construct
  REGION 1..13: note = ATaRI peptide
SELVHSLTGAWVL

SEQ ID NO: 55 - protein, 19 aa, synthetic construct
  REGION 1..19: note = ATaRI peptide
FSSKHNVIGKCSWFTRSYL

SEQ ID NO: 56 - protein, 17 aa, synthetic construct
  REGION 1..17: note = ATaRI peptide
EQRLALLHVSETALRHY

SEQ ID NO: 57 - protein, 17 aa, synthetic construct
  REGION 1..17: note = ATaRI peptide
YYIVKQGKVKQLYVLFK

SEQ ID NO: 58 - protein, 10 aa, synthetic construct
  REGION 1..10: note = ATaRI peptide
TMDCITLEGL

SEQ ID NO: 59 - protein, 22 aa, synthetic construct
  REGION 1..22: note = ATaRI peptide
SEKTFMPKVRKYIFGYRSIVTD

SEQ ID NO: 60 - protein, 19 aa, synthetic construct
  REGION 1..19: note = ATaRI peptide
KGRGLPKKGWYISCPTNGR

SEQ ID NO: 61 - protein, 26 aa, synthetic construct
  REGION 1..26: note = ATaRI peptide
VLSKLNMKVSIYLFTRERNCFNWYFH

SEQ ID NO: 62 - protein, 26 aa, synthetic construct
  REGION 1..26: note = ATaRI peptide
VSGLVSLEVSINEQLENFRTFHTYLI

SEQ ID NO: 63 - protein, 15 aa, synthetic construct
  REGION 1..15: note = ATaRI peptide
LTHLPEEIGMNPVNA

SEQ ID NO: 64 - protein, 9 aa, synthetic construct
  REGION 1..9: note = ATaRI peptide
HPLGWLVPQ

SEQ ID NO: 65 - protein, 57 aa, synthetic construct
  REGION 1..57: note = ATaRI peptide
INQILGRRVGDALLREKRGAGGEGPECSRSGGRMSLSPFLWRILALQPHSESLNGLH

SEQ ID NO: 66 - protein, 11 aa, synthetic construct
  REGION 1..11: note = ATaRI peptide
QNNWCGPCRCV

SEQ ID NO: 67 - protein, 57 aa, synthetic construct
  REGION 1..57: note = ATaRI peptide
KMQDLLKKGECCQEWWLMPAIPELWEAKVGGSLEPRSARLAWAKWQHPILKFFFFFK

SEQ ID NO: 68 - protein, 13 aa, synthetic construct
  REGION 1..13: note = ATaRI peptide
GQIQYSIGGKTCF

SEQ ID NO: 69 - protein, 16 aa, synthetic construct
  REGION 1..16: note = ATaRI peptide
TENHLIRKVIFILNLF

SEQ ID NO: 70 - protein, 9 aa, synthetic construct
  REGION 1..9: note = ATaRI peptide
DSGKLPKKK

SEQ ID NO: 71 - protein, 27 aa, synthetic construct
  REGION 1..27: note = ATaRI peptide
VGGERDPMVMTVTLAQCARTLSKLSIL

SEQ ID NO: 72 - protein, 47 aa, synthetic construct
  REGION 1..47: note = ATaRI peptide
SCWFLTAEGMSISLQILIHHIFLMFNLVIFYLLGDIFTLYRQDLKII

SEQ ID NO: 73 - protein, 30 aa, synthetic construct
  REGION 1..30: note = ATaRI peptide
LLNLTRSPVSYGPYFFPPNIISIMCIYLFF

SEQ ID NO: 74 - protein, 9 aa, synthetic construct
  REGION 1..9: note = ATaRI peptide
ETVEAINWG

SEQ ID NO: 75 - protein, 9 aa, synthetic construct
  REGION 1..9: note = ATaRI peptide
TEVHKIVNR

SEQ ID NO: 76 - protein, 9 aa, synthetic construct
  REGION 1..9: note = ATaRI peptide
GNIMQVPPL

SEQ ID NO: 77 - protein, 23 aa, synthetic construct
  REGION 1..23: note = ATaRI peptide
FQPPFFTLGKMEKFEIICIYVYF

SEQ ID NO: 78 - protein, 16 aa, synthetic construct
  REGION 1..16: note = ATaRI peptide
ERIQHQQKVTHFLLES

SEQ ID NO: 79 - protein, 88 aa, synthetic construct
  REGION 1..88: note = ATaRI peptide
DLKVIIISGMYLISVLSILQCPQELSESLVNWGIPLFNWRIVLKLLYKNINYGKHLCSWWFGPNAINCRIYNKDDCSVKLCLFLFVRY

SEQ ID NO: 80 - protein, 45 aa, synthetic construct
  REGION 1..45: note = ATaRI peptide
AYLAGSIKGKKGKNRPGTVAHACNPNTLGGQGGWITRSGDRDHPG

SEQ ID NO: 81 - protein, 12 aa, synthetic construct
  REGION 1..12: note = ATaRI peptide
IEAVQEFTRYHL

SEQ ID NO: 82 - protein, 27 aa, synthetic construct
  REGION 1..27: note = ATaRI peptide
ITIAPLAKGLFSVLFLIQDISQTVVHF

SEQ ID NO: 83 - protein, 19 aa, synthetic construct
  REGION 1..19: note = ATaRI peptide
RVGTVGYMGECWAACVNAP

SEQ ID NO: 84 - protein, 38 aa, synthetic construct
  REGION 1..38: note = ATaRI peptide
EAKSICKMVSSWWPDATLKLVAPLPGPGPSLSPEQQTG

SEQ ID NO: 85 - protein, 50 aa, synthetic construct
  REGION 1..50: note = ATaRI peptide
HTVVDRPQVREVSRQQTGYGGMSPGVQELCGCPGFPLHPCLFNMRVPTGK

SEQ ID NO: 86 - protein, 35 aa, synthetic construct
  REGION 1..35: note = ATaRI peptide
CRAIQKYSVSTYGFNKYLWSTYCVPWPVLSAGAVG

SEQ ID NO: 87 - protein, 14 aa, synthetic construct
  REGION 1..14: note = ATaRI peptide
RNPEEDGKGKKRKR

SEQ ID NO: 88 - protein, 9 aa, synthetic construct
  REGION 1..9: note = ATaRI peptide
PIIEKKLER

SEQ ID NO: 89 - protein, 80 aa, synthetic construct
  REGION 1..80: note = ATaRI peptide
MPPGSLPPVWRHDFVSYLFTLCLLSHLNLCFKKHFTSYNQYGDKLVSEGILCKLHEVNIVLKIAYWMAHILVYITCLLKQ

SEQ ID NO: 90 - protein, 18 aa, synthetic construct
  REGION 1..18: note = ATaRI peptide
TIVMHNPKVMMVFKILRY

SEQ ID NO: 91 - protein, 27 aa, synthetic construct
  REGION 1..27: note = ATaRI peptide
GGDATGVDRFVDFDNLFFRLVIFKFKI

SEQ ID NO: 92 - protein, 24 aa, synthetic construct
  REGION 1..24: note = ATaRI peptide
EKIDMESLVLIIVCFILFEIVFLV

SEQ ID NO: 93 - protein, 43 aa, synthetic construct
  REGION 1..43: note = ATaRI peptide
SFEVGAGQVSLHIDWGYIVHVGIIIFIIWVGFKFFKYLFNIYL

SEQ ID NO: 94 - protein, 11 aa, synthetic construct
  REGION 1..11: note = ATaRI peptide
GFFNIYHPVSN

SEQ ID NO: 95 - protein, 14 aa, synthetic construct
  REGION 1..14: note = ATaRI peptide
KGRKRLHLGKKQIL

SEQ ID NO: 96 - protein, 13 aa, synthetic construct
  REGION 1..13: note = ATaRI peptide
EEEKQVVEGKFDI

SEQ ID NO: 97 - protein, 9 aa, synthetic construct
  REGION 1..9: note = ATaRI peptide
ALQSHLCYW

SEQ ID NO: 98 - protein, 13 aa, synthetic construct
  REGION 1..13: note = ATaRI peptide
SKLMLESQVKRSI

SEQ ID NO: 99 - protein, 9 aa, synthetic construct
  REGION 1..9: note = ATaRI peptide
ILITQEKPR

SEQ ID NO: 100 - protein, 18 aa, synthetic construct
  REGION 1..18: note = ATaRI peptide
MYQPLLAVGEYLTWSFFF

SEQ ID NO: 101 - protein, 38 aa, synthetic construct
  REGION 1..38: note = ATaRI peptide
SIVESSVIRYSTVFLDTVICAISIMSGKLTSIIGRCLW

SEQ ID NO: 102 - protein, 62 aa, synthetic construct
  REGION 1..62: note = ATaRI peptide
DSARIPPDVSTTLIKSSSRRFCFVGSISSEGIVKLETSEKPNVNKLYLRRYYRLNLFHTARE

SEQ ID NO: 103 - protein, 31 aa, synthetic construct
  REGION 1..31: note = ATaRI peptide
GDRVICLQVLGASEIEARGGENWEECVGWEG

SEQ ID NO: 104 - protein, 36 aa, synthetic construct
  REGION 1..36: note = ATaRI peptide
HLLKTHVQVGSLQMAGYCFSFLLSKGADVGLVFSVV

SEQ ID NO: 105 - protein, 31 aa, synthetic construct
  REGION 1..31: note = ATaRI peptide
IFDTFISGGWCQRIGWVQVGVPAWPQPRGDK

SEQ ID NO: 106 - protein, 13 aa, synthetic construct
  REGION 1..13: note = ATaRI peptide
EIQKPERKVSIIF

SEQ ID NO: 107 - protein, 29 aa, synthetic construct
  REGION 1..29: note = ATaRI peptide
RVILASNRGMRVFSVSTLLLTANRWKHVD

SEQ ID NO: 108 - protein, 22 aa, synthetic construct
  REGION 1..22: note = ATaRI peptide
ICLLIIIQVRNPIFSYADNKTV

SEQ ID NO: 109 - protein, 54 aa, synthetic construct
  REGION 1..54: note = ATaRI peptide
PTTINTGRGTSHSDCNCTRFAGCVLGTNPSCRSTCLEPFWFALLGDKECEFFKT

SEQ ID NO: 110 - protein, 9 aa, synthetic construct
  REGION 1..9: note = ATaRI peptide
TSMVHELNR

SEQ ID NO: 111 - protein, 13 aa, synthetic construct
  REGION 1..13: note = ATaRI peptide
KLNWSAPRVGTHK

SEQ ID NO: 112 - protein, 29 aa, synthetic construct
  REGION 1..29: note = ATaRI peptide
VLQGDSGKRQVISVYLVSVAHDGAVLGAW

SEQ ID NO: 113 - protein, 9 aa, synthetic construct
  REGION 1..9: note = ATaRI peptide
KKKKTPLKT

SEQ ID NO: 114 - protein, 9 aa, synthetic construct
  REGION 1..9: note = ATaRI peptide
DVMSVCSLL

SEQ ID NO: 115 - protein, 62 aa, synthetic construct
  REGION 1..62: note = ATaRI peptide
EKIGSSLPVSSSASGHLGDSLSCLQGPPPLCRVSLGAQTPNRVFSVYTASRVHSSDGLGLGG

SEQ ID NO: 116 - protein, 51 aa, synthetic construct
  REGION 1..51: note = ATaRI peptide
TPSEAIEIVSGVGGPQITGDEVWASCVLSPRRPGLQSNTHLAPAMGPTLTP

SEQ ID NO: 117 - protein, 32 aa, synthetic construct
  REGION 1..32: note = ATaRI peptide
PLFAQKLQVCSPRVTFWEFVKTSVENEPPRPK

SEQ ID NO: 118 - protein, 58 aa, synthetic construct
  REGION 1..58: note = ATaRI peptide
SRSHQDAKVPVCCCVRHLLRMSCVPLGSRSCFANHPPGGHHRCPAKSRFQKAESVTLA

SEQ ID NO: 119 - protein, 31 aa, synthetic construct
  REGION 1..31: note = ATaRI peptide
LERTLEQKVIGEGCGLQVGRAAALCAAGQSS

SEQ ID NO: 120 - protein, 21 aa, synthetic construct
  REGION 1..21: note = ATaRI peptide
IQGLFQQGVHFIILPLSSFYN

SEQ ID NO: 121 - protein, 82 aa, synthetic construct
  REGION 1..82: note = ATaRI peptide
RPYLLIHDGRPVGHQDLTGVKAPLSQGGGCAESLFHWAKPLTELGHQHSWVGGKNLMGLPAGGWGQVRTQLCPFLGLTPEGP

SEQ ID NO: 122 - protein, 9 aa, synthetic construct
  REGION 1..9: note = ATaRI peptide
HQPCSKLFR

SEQ ID NO: 123 - protein, 9 aa, synthetic construct
  REGION 1..9: note = ATaRI peptide
YVLFRPNRR

SEQ ID NO: 124 - protein, 83 aa, synthetic construct
  REGION 1..83: note = ATaRI peptide
KNEKEQERSKFLINFTIQYQGNVVLNIRLYYTINYVPLSTLIQSQISLAGAEQSLVQLLWRASAVFHSSPLNSLTLEEKEDER

SEQ ID NO: 125 - protein, 18 aa, synthetic construct
  REGION 1..18: note = ATaRI peptide
FILSLASQVRMLQVLLLL

SEQ ID NO: 126 - protein, 19 aa, synthetic construct
  REGION 1..19: note = ATaRI peptide
NHIGSVIKVSRIIVFILIK

SEQ ID NO: 127 - protein, 15 aa, synthetic construct
  REGION 1..15: note = ATaRI peptide
VAAQKGYTRYGSSFF

SEQ ID NO: 128 - protein, 22 aa, synthetic construct
  REGION 1..22: note = ATaRI peptide
RNGKTPLMVGPPPENRQFSTWN

SEQ ID NO: 129 - protein, 51 aa, synthetic construct
  REGION 1..51: note = ATaRI peptide
FEVKSVFMVRMAPPQKELSVPFLNTVCHAFFTCSCPVVTVAACTQQTLQFP

SEQ ID NO: 130 - protein, 34 aa, synthetic construct
  REGION 1..34: note = ATaRI peptide
EAVILSETVTRQGIFPRSAVASGTYLCPTCSQQG

SEQ ID NO: 131 - protein, 9 aa, synthetic construct
  REGION 1..9: note = ATaRI peptide
QQRDNHDLR

SEQ ID NO: 132 - protein, 25 aa, synthetic construct
  REGION 1..25: note = ATaRI peptide
PNGILEEQGTEAALWLGLGGKCVLF

SEQ ID NO: 133 - protein, 25 aa, synthetic construct
  REGION 1..25: note = ATaRI peptide
YINASYIDVSGQRFLVPLAQLGHEQ

SEQ ID NO: 134 - protein, 29 aa, synthetic construct
  REGION 1..29: note = ATaRI peptide
IRKFCIQPVSISSCCPSRKIIFREHHAQS

SEQ ID NO: 135 - protein, 50 aa, synthetic construct
  REGION 1..50: note = ATaRI peptide
TEVQEREQVRSAAQPGPSRAACAPEALSPFITNVPPAITANTWVRPSQDH

SEQ ID NO: 136 - protein, 20 aa, synthetic construct
  REGION 1..20: note = ATaRI peptide
VPTFLFFKVRIKVVQEIIHL

SEQ ID NO: 137 - protein, 9 aa, synthetic construct
  REGION 1..9: note = ATaRI peptide
PKAPKLEER

SEQ ID NO: 138 - protein, 40 aa, synthetic construct
  REGION 1..40: note = ATaRI peptide
ILEILNSTGYVNVVFKWCIKKIPTWPGVVAHVYNPSTLGG

SEQ ID NO: 139 - protein, 24 aa, synthetic construct
  REGION 1..24: note = ATaRI peptide
DEEKGPETVSPKIPRPLPHPHTRE

SEQ ID NO: 140 - protein, 16 aa, synthetic construct
  REGION 1..16: note = ATaRI peptide
IKMLPVELGKYKIIKR

SEQ ID NO: 141 - protein, 53 aa, synthetic construct
  REGION 1..53: note = ATaRI peptide
GSCWTARKSERGRGPGHPRGPHATPASAARRPGTRLRVGGGVAPAPAFGFCRA

SEQ ID NO: 142 - protein, 10 aa, synthetic construct
  REGION 1..10: note = ATaRI peptide
NVCMGDHKVT

SEQ ID NO: 143 - protein, 9 aa, synthetic construct
  REGION 1..9: note = ATaRI peptide
INEKPSGEV

SEQ ID NO: 144 - protein, 9 aa, synthetic construct
  REGION 1..9: note = ATaRI peptide
GQDSPTGKR

SEQ ID NO: 145 - protein, 11 aa, synthetic construct
  REGION 1..11: note = ATaRI peptide
KEETKFAQVNT

SEQ ID NO: 146 - protein, 19 aa, synthetic construct
  REGION 1..19: note = ATaRI peptide
LCDYKVVKVRQISSPLQET

SEQ ID NO: 147 - protein, 35 aa, synthetic construct
  REGION 1..35: note = ATaRI peptide
TRAMSVEQVKSLSSLTVFVHKFRTARTLEMPWVQR

SEQ ID NO: 148 - protein, 11 aa, synthetic construct
  REGION 1..11: note = ATaRI peptide
SSGVSGSQVSF

SEQ ID NO: 149 - protein, 60 aa, synthetic construct
  REGION 1..60: note = ATaRI peptide
NLCSRGYEGKMPGIFTFVLKFSRLLSWNLIQENHHVLVWRVLEISIDQHLCVFNYSVGLF

SEQ ID NO: 150 - protein, 46 aa, synthetic construct
  REGION 1..46: note = ATaRI peptide
SRTSLCFKVSISYKAGKRIWSMLQPKESSKDIENKQKPKHSAQTLP

SEQ ID NO: 151 - protein, 51 aa, synthetic construct
  REGION 1..51: note = ATaRI peptide
FTWSDGSPVSNFTYYITFLLYRVFILMLSFFLMQTFNKTVHYDSHYPAMQN

SEQ ID NO: 152 - protein, 15 aa, synthetic construct
  REGION 1..15: note = ATaRI peptide
EKKFLWKYVRTSIIF

SEQ ID NO: 153 - protein, 9 aa, synthetic construct
  REGION 1..9: note = ATaRI peptide
LISLDKKFA

SEQ ID NO: 154 - protein, 14 aa, synthetic construct
  REGION 1..14: note = ATaRI peptide
ASLECLRMGECHIS

SEQ ID NO: 155 - protein, 10 aa, synthetic construct
  REGION 1..10: note = ATaRI peptide
GYICKRPKSK

SEQ ID NO: 156 - protein, 9 aa, synthetic construct
  REGION 1..9: note = ATaRI peptide
GKTTILYQL

SEQ ID NO: 157 - protein, 11 aa, synthetic construct
  REGION 1..11: note = ATaRI peptide
LYRMLAHEVNF

SEQ ID NO: 158 - protein, 43 aa, synthetic construct
  REGION 1..43: note = ATaRI peptide
FPTSLPTEGTQEIVCFFFFFFFFFSLKEGKITVLTCTGIAPTL

SEQ ID NO: 159 - protein, 264 aa, synthetic construct
  REGION 1..264: note = ATaRI peptide
GCSVAVHQGKHPTARRGAPACAQRSPPPPPGPQPPAPPPRAAAAGGTRRVRGGARGVWAAHVGESACGPDCHVIPLSLSQVSFGRRLRLGPGSADSAGRGGAGRRPRPRDLGRGGGGGGGGGGARPSRGSRGHGGGFGRVERPLLPWPAAACLPQCLETSCGVETGSGTRRQCGEAGGRLASLDGEGCGARCTPSQKARALPPPPGSCLRRRWRSPLLTMREWRGCCSACGVAAAGHHQPRWLKRWRCQVTFGEPLSLFLVVNN

SEQ ID NO: 160 - protein, 9 aa, synthetic construct
  REGION 1..9: note = ATaRI peptide
CRQAFHVTW

SEQ ID NO: 161 - protein, 31 aa, synthetic construct
  REGION 1..31: note = ATaRI peptide
CKYHFSKLVRISLGFNEMIMISFDNRMTLFY

SEQ ID NO: 162 - protein, 77 aa, synthetic construct
  REGION 1..77: note = ATaRI peptide
HDGACPTTSKLSNWVDNPGLLSPLVLFLVCYATSEPLNFNIPKCKFFLIEQILFSCKDNVLLCLVIDPYYSQVVYKF

SEQ ID NO: 163 - protein, 42 aa, synthetic construct
  REGION 1..42: note = ATaRI peptide
AQSENNQTGKFSRITNSKTLLSPTLIFFPFWFILFENMQGCG

SEQ ID NO: 164 - protein, 23 aa, synthetic construct
  REGION 1..23: note = ATaRI peptide
DNASQKVAVSIFSLLHLMKQELY

SEQ ID NO: 165 - protein, 44 aa, synthetic construct
  REGION 1..44: note = ATaRI peptide
IVSRMKERVSPAQGIFQNIPKHILLWFILSKLNDREVTNMYIAI

SEQ ID NO: 166 - protein, 22 aa, synthetic construct
  REGION 1..22: note = ATaRI peptide
VDVPTIQEVKSVSFISTSSTFS

SEQ ID NO: 167 - protein, 42 aa, synthetic construct
  REGION 1..42: note = ATaRI peptide
GEAVATLKGKLSAGSGEESELSFLRCLKICHIEDSFMYASIY

SEQ ID NO: 168 - protein, 132 aa, synthetic construct
  REGION 1..132: note = ATaRI peptide
PVDKVELSGKFRSHSRNIWRYMALGKYSAIHDSTYSSTEPMSQFLQILQNVKPGRANPLVFLRSLLLSLSFCFFFLFFFLFLKWGLALPPRLECSGMILAHYNFQLLGSSNPPTSASQEVARAVDVYTTAHV

SEQ ID NO: 169 - protein, 9 aa, synthetic construct
  REGION 1..9: note = ATaRI peptide
RKENITAKV

SEQ ID NO: 170 - protein, 15 aa, synthetic construct
  REGION 1..15: note = ATaRI peptide
SIPSASRKVSWSAGK

SEQ ID NO: 171 - protein, 37 aa, synthetic construct
  REGION 1..37: note = ATaRI peptide
KNKESLLEVRLILQSGRKEKDVCSIFKSFASENNGKI

SEQ ID NO: 172 - protein, 57 aa, synthetic construct
  REGION 1..57: note = ATaRI peptide
YVPKGKTKVRKKKKKALSNKAFHENETKEILSWQVKYILCCCRFHNPATCIQIGQYY

SEQ ID NO: 173 - protein, 18 aa, synthetic construct
  REGION 1..18: note = ATaRI peptide
VMGIRIAKVRERSDFTLS

SEQ ID NO: 174 - protein, 14 aa, synthetic construct
  REGION 1..14: note = ATaRI peptide
QRHAETSKVKPASS

SEQ ID NO: 175 - protein, 19 aa, synthetic construct
  REGION 1..19: note = ATaRI peptide
GLYEDIRKVSFLFCCDVMF

SEQ ID NO: 176 - protein, 43 aa, synthetic construct
  REGION 1..43: note = ATaRI peptide
NKIWGEKKVWFFGFFKISLTESHTFRTAFVSQICLIKNMLAQM

SEQ ID NO: 177 - protein, 15 aa, synthetic construct
  REGION 1..15: note = ATaRI peptide
PVLFACQQVGFTNSL

SEQ ID NO: 178 - protein, 47 aa, synthetic construct
  REGION 1..47: note = ATaRI peptide
GGKLYAVKVGSQRVARKGLGPSALLPAPPAWAGPGVAGARSLGGLAC

SEQ ID NO: 179 - protein, 31 aa, synthetic construct
  REGION 1..31: note = ATaRI peptide
YSSKLLKSCEYKRKGRPGAEAYTCNTTTLGG

SEQ ID NO: 180 - protein, 9 aa, synthetic construct
  REGION 1..9: note = ATaRI peptide
EKPKEWLER

SEQ ID NO: 181 - protein, 54 aa, synthetic construct
  REGION 1..54: note = ATaRI peptide
PWPCCSPKVGAGGARGPGSRPRRGALEPAAEALLAAGEAPSCAGAAGRDKLLCS

SEQ ID NO: 182 - protein, 9 aa, synthetic construct
  REGION 1..9: note = ATaRI peptide
VIFDPYAPK

SEQ ID NO: 183 - protein, 71 aa, synthetic construct
  REGION 1..71: note = ATaRI peptide
KKRMACKLVCVFYLDNPHCVFGILAFVFLSICINQRFLSFDWVLSEGALPQSICFSEFIGYLGPFSPKISV

SEQ ID NO: 184 - protein, 68 aa, synthetic construct
  REGION 1..68: note = ATaRI peptide
EHEELSLSVSICNPNIETLTLKRVDFLFKNINLKYFLLEYLLYPQNEFPIHENDPLRKLLNPTKSLLT

SEQ ID NO: 185 - protein, 9 aa, synthetic construct
  REGION 1..9: note = ATaRI peptide
VKVMLSKTM

SEQ ID NO: 186 - protein, 28 aa, synthetic construct
  REGION 1..28: note = ATaRI peptide
VFSAVLHRGFKYNGSKIFPFSTHPYYCL

SEQ ID NO: 187 - protein, 38 aa, synthetic construct
  REGION 1..38: note = ATaRI peptide
DLAKVADLVSEQGQPGVLMETYSIVIGYLPRDEGKRVL

SEQ ID NO: 188 - protein, 17 aa, synthetic construct
  REGION 1..17: note = ATaRI peptide
RFWTEVYPVRREIIVGY

SEQ ID NO: 189 - protein, 9 aa, synthetic construct
  REGION 1..9: note = ATaRI peptide
SHPYILADR

SEQ ID NO: 190 - protein, 9 aa, synthetic construct
  REGION 1..9: note = ATaRI peptide
GSEDIDNQG

SEQ ID NO: 191 - protein, 20 aa, synthetic construct
  REGION 1..20: note = ATaRI peptide
PHDWDLEEVSLGSTFDLLEN

SEQ ID NO: 192 - protein, 23 aa, synthetic construct
  REGION 1..23: note = ATaRI peptide
GEMQKQAQVRNLSSSQPLVKTII

SEQ ID NO: 193 - protein, 9 aa, synthetic construct
  REGION 1..9: note = ATaRI peptide
FVQFMQNFR

SEQ ID NO: 194 - protein, 14 aa, synthetic construct
  REGION 1..14: note = ATaRI peptide
ESPSQSHLGELINI

SEQ ID NO: 195 - protein, 15 aa, synthetic construct
  REGION 1..15: note = ATaRI peptide
SNTQFIENVSYLVIL

SEQ ID NO: 196 - protein, 23 aa, synthetic construct
  REGION 1..23: note = ATaRI peptide
QENTPRSKVRLKGEGSLLILANT

SEQ ID NO: 197 - protein, 11 aa, synthetic construct
  REGION 1..11: note = ATaRI peptide
DVFEEPSERYN

SEQ ID NO: 198 - protein, 18 aa, synthetic construct
  REGION 1..18: note = ATaRI peptide
YDIMQEFMVNIFLTKVYM

SEQ ID NO: 199 - protein, 19 aa, synthetic construct
  REGION 1..19: note = ATaRI peptide
LGMGYKENGQHTHLFEIFF

SEQ ID NO: 200 - protein, 16 aa, synthetic construct
  REGION 1..16: note = ATaRI peptide
IRGQPSPLGWLQYKLG

SEQ ID NO: 201 - protein, 57 aa, synthetic construct
  REGION 1..57: note = ATaRI peptide
YVLTGTDSVSFRPSASALGTAHLGAEGGPAQGGGISQEGHSFHKTGLLFLLPPPLLV

SEQ ID NO: 202 - protein, 9 aa, synthetic construct
  REGION 1..9: note = ATaRI peptide
CLLLLNERR

SEQ ID NO: 203 - protein, 17 aa, synthetic construct
  REGION 1..17: note = ATaRI peptide
SQTNAENQGIQFIYFFL

SEQ ID NO: 204 - protein, 10 aa, synthetic construct
  REGION 1..10: note = ATaRI peptide
RIMLQKWQVQ

SEQ ID NO: 205 - protein, 24 aa, synthetic construct
  REGION 1..24: note = ATaRI peptide
VLADYTSEVSSSRGNHSCPQVFGR

SEQ ID NO: 206 - protein, 56 aa, synthetic construct
  REGION 1..56: note = ATaRI peptide
NFGQVPKQVQHALSFALLSQKSVCSVRTFSPGVKVKEMAEEVKWSPIIFLCFQYQA

SEQ ID NO: 207 - protein, 14 aa, synthetic construct
  REGION 1..14: note = ATaRI peptide
FSDEEDSEVWNSFA

SEQ ID NO: 208 - protein, 47 aa, synthetic construct
  REGION 1..47: note = ATaRI peptide
NLAKAIATVIKYCLCVRACVCVCVYVCMCLCLGKREVKENLSFECSV

SEQ ID NO: 209 - protein, 12 aa, synthetic construct
  REGION 1..12: note = ATaRI peptide
EDIFYTSKVLCL

SEQ ID NO: 210 - protein, 19 aa, synthetic construct
  REGION 1..19: note = ATaRI peptide
VDLCTTWEVSAWRRGHREG

SEQ ID NO: 211 - protein, 9 aa, synthetic construct
  REGION 1..9: note = ATaRI peptide
LGSQRDKRW

SEQ ID NO: 212 - protein, 69 aa, synthetic construct
  REGION 1..69: note = ATaRI peptide
LRVGAGREVSVGEGRAEREVSVGERRAEREVSVGEARAGGRGGLAGSWMWGAASGGVGEGQGEARAAGR

SEQ ID NO: 213 - protein, 35 aa, synthetic construct
  REGION 1..35: note = ATaRI peptide
IGHILVSWVCSELLTPDTVSYRCAMLQFLMNMRQI

SEQ ID NO: 214 - protein, 31 aa, synthetic construct
  REGION 1..31: note = ATaRI peptide
ELRSKSGHVGDFCCRGRAAFPPASLTFTRLL

SEQ ID NO: 215 - protein, 27 aa, synthetic construct
  REGION 1..27: note = ATaRI peptide
KILEAVTLGWSLFSFPVSLKSDQLLTQ

SEQ ID NO: 216 - protein, 15 aa, synthetic construct
  REGION 1..15: note = ATaRI peptide
SPALTVSKGNFIDQV

SEQ ID NO: 217 - protein, 25 aa, synthetic construct
  REGION 1..25: note = ATaRI peptide
RKAMTKKKVSIIEILFSYGKELRFI

SEQ ID NO: 218 - protein, 16 aa, synthetic construct
  REGION 1..16: note = ATaRI peptide
EAKGDSPQVKLKYIFV

SEQ ID NO: 219 - protein, 12 aa, synthetic construct
  REGION 1..12: note = ATaRI peptide
IMSVLDTKVSEC

SEQ ID NO: 220 - protein, 18 aa, synthetic construct
  REGION 1..18: note = ATaRI peptide
ESARVRIRVTIYYFNIVN

SEQ ID NO: 221 - protein, 37 aa, synthetic construct
  REGION 1..37: note = ATaRI peptide
AGLGLTGLGIQFIITARLSHWGNACLVPFLSTIRVYI

SEQ ID NO: 222 - protein, 34 aa, synthetic construct
  REGION 1..34: note = ATaRI peptide
AALNGHAQVMAFCQNVCVICTVCKRQTPGKVKTC

SEQ ID NO: 223 - protein, 33 aa, synthetic construct
  REGION 1..33: note = ATaRI peptide
SPKSSPTEGRELYPSEIHFGCYLEKGGCRESMQ

SEQ ID NO: 224 - protein, 9 aa, synthetic construct
  REGION 1..9: note = ATaRI peptide
EKGINISNR

SEQ ID NO: 225 - protein, 21 aa, synthetic construct
  REGION 1..21: note = ATaRI peptide
DEAQDCTPGDTLFRTSVVSNT

SEQ ID NO: 226 - protein, 9 aa, synthetic construct
  REGION 1..9: note = ATaRI peptide
QKEIEEREK

SEQ ID NO: 227 - protein, 10 aa, synthetic construct
  REGION 1..10: note = ATaRI peptide
SLVEKDKECK

SEQ ID NO: 228 - protein, 9 aa, synthetic construct
  REGION 1..9: note = ATaRI peptide
SNSFLANMG

SEQ ID NO: 229 - protein, 20 aa, synthetic construct
  REGION 1..20: note = ATaRI peptide
ADVCRLEWVIATFSLLDFCL

SEQ ID NO: 230 - protein, 10 aa, synthetic construct
  REGION 1..10: note = ATaRI peptide
FAKENDFKVS

SEQ ID NO: 231 - protein, 91 aa, synthetic construct
  REGION 1..91: note = ATaRI peptide
CTHRERSEVSGGPKPHPGHHHTIALVGDGRSGGPGAACLQVLACLGPWACWLPSSAPLCSCLSVLWLLGPSHFLSSCVLFLPFLLSSRYEY

SEQ ID NO: 232 - protein, 40 aa, synthetic construct
  REGION 1..40: note = ATaRI peptide
FCHGVPETGDCLVPGSLAFGFWHEGMRCPPQSLAVAWLVG

SEQ ID NO: 233 - protein, 13 aa, synthetic construct
  REGION 1..13: note = ATaRI peptide
ISCHKKAAGEYSY

SEQ ID NO: 234 - protein, 19 aa, synthetic construct
  REGION 1..19: note = ATaRI peptide
MKLTQSEQVRHIPNICDKG

SEQ ID NO: 235 - protein, 14 aa, synthetic construct
  REGION 1..14: note = ATaRI peptide
DWTPRPRIGMAQSC

SEQ ID NO: 236 - protein, 34 aa, synthetic construct
  REGION 1..34: note = ATaRI peptide
IIVLTGAGVCKTSTWGGRICIFLCLFQVGNIFLV

SEQ ID NO: 237 - protein, 21 aa, synthetic construct
  REGION 1..21: note = ATaRI peptide
VRPVALIPSKLVMVFGEHFYI

SEQ ID NO: 238 - protein, 19 aa, synthetic construct
  REGION 1..19: note = ATaRI peptide
EQISRRLDGKKGSRTILKV

SEQ ID NO: 239 - protein, 9 aa, synthetic construct
  REGION 1..9: note = ATaRI peptide
IDLSVCTQW

SEQ ID NO: 240 - protein, 13 aa, synthetic construct
  REGION 1..13: note = ATaRI peptide
LQLLEEKTGKGQL

SEQ ID NO: 241 - protein, 36 aa, synthetic construct
  REGION 1..36: note = ATaRI peptide
MCLLKGNMVGFSRQLKSFLINYPKCLQTLANFVLSL

SEQ ID NO: 242 - protein, 18 aa, synthetic construct
  REGION 1..18: note = ATaRI peptide
TTESERLQVFLKFYLLNG

SEQ ID NO: 243 - protein, 15 aa, synthetic construct
  REGION 1..15: note = ATaRI peptide
ESNSEIEQVHLHFIG

SEQ ID NO: 244 - protein, 18 aa, synthetic construct
  REGION 1..18: note = ATaRI peptide
GGTPYGGQCEYIQKVREV

SEQ ID NO: 245 - protein, 40 aa, synthetic construct
  REGION 1..40: note = ATaRI peptide
ILSVAYKKGNPQIQEADKKDQRKGGNSVSWVQVTLMPQPP

SEQ ID NO: 246 - protein, 40 aa, synthetic construct
  REGION 1..40: note = ATaRI peptide
LVQVEQKAVKLFLPFIKQMLSSKVSLWFLQFLSTLKYFYF

SEQ ID NO: 247 - protein, 41 aa, synthetic construct
  REGION 1..41: note = ATaRI peptide
RSLINSNVVRFCSTFLTLHNLGYEQDMKGFHLSFPVVFIFS

SEQ ID NO: 248 - protein, 15 aa, synthetic construct
  REGION 1..15: note = ATaRI peptide
MVFLKGKLVRLGSLL

SEQ ID NO: 249 - protein, 17 aa, synthetic construct
  REGION 1..17: note = ATaRI peptide
GKISATEDSKFTFACFT

SEQ ID NO: 250 - protein, 11 aa, synthetic construct
  REGION 1..11: note = ATaRI peptide
RIEFVGQIGEF

SEQ ID NO: 251 - protein, 14 aa, synthetic construct
  REGION 1..14: note = ATaRI peptide
YIGANVRLRYECVL

SEQ ID NO: 252 - protein, 36 aa, synthetic construct
  REGION 1..36: note = ATaRI peptide
IKKEITGIGKLKRVCKLKFFVLVDIFKILKYCLNII

SEQ ID NO: 253 - protein, 33 aa, synthetic construct
  REGION 1..33: note = ATaRI peptide
IMDGAPVKGNTLFSYFFCIVQTSVFMAVLFVFI

SEQ ID NO: 254 - protein, 25 aa, synthetic construct
  REGION 1..25: note = ATaRI peptide
SDLRIPPNWLVSPFVDLKFSVSNLG

SEQ ID NO: 255 - protein, 20 aa, synthetic construct
  REGION 1..20: note = ATaRI peptide
IFEKSNAAVSILPNICSFFS

SEQ ID NO: 256 - protein, 9 aa, synthetic construct
  REGION 1..9: note = ATaRI peptide
DAIGMGLNL

SEQ ID NO: 257 - protein, 44 aa, synthetic construct
  REGION 1..44: note = ATaRI peptide
KRPVDPIRVRGNMLTTASLWRRVILSLTHHPDSHLRHISGYRHK

SEQ ID NO: 258 - protein, 57 aa, synthetic construct
  REGION 1..57: note = ATaRI peptide
CRQTKLEEVRRGGKQQCRNWGLGNVGTGGSQAARRREQQELSCLSFSFLFVHDEVAA

SEQ ID NO: 259 - protein, 9 aa, synthetic construct
  REGION 1..9: note = ATaRI peptide
GSLNPGKQL

SEQ ID NO: 260 - protein, 10 aa, synthetic construct
  REGION 1..10: note = ATaRI peptide
CRQMSIDKVR

SEQ ID NO: 261 - protein, 9 aa, synthetic construct
  REGION 1..9: note = ATaRI peptide
GSLNPGKQR

SEQ ID NO: 262 - protein, 62 aa, synthetic construct
  REGION 1..62: note = ATaRI peptide
IVHGSGSQVGPCSLRVTPSGQHPLGYLQEPGLKALASQAPGRGLLERVPHRCICKRTPGQRM

SEQ ID NO: 263 - protein, 39 aa, synthetic construct
  REGION 1..39: note = ATaRI peptide
NKAIKKRGVISPGPSASAMQGCGEQGCILKQTSALPGGQ

SEQ ID NO: 264 - protein, 9 aa, synthetic construct
  REGION 1..9: note = ATaRI peptide
TSDVSAIEK

SEQ ID NO: 265 - protein, 132 aa, synthetic construct
  REGION 1..132: note = ATaRI peptide
IMDFVQKKVSQALWGRDAPPVLLAPHSGPCSRRWGEGPGDLSIPKAGGWPDWEATVSMDGPPRMGKPGPNLFSQSSAHIPDPKPSHPSVPLQLHWLPAPYPQIKQSQVLLQATLQGPRAPPSNGQGSSFLEV

SEQ ID NO: 266 - protein, 21 aa, synthetic construct
  REGION 1..21: note = ATaRI peptide
IRPESPAQVRHGRTCEHSASL

SEQ ID NO: 267 - protein, 35 aa, synthetic construct
  REGION 1..35: note = ATaRI peptide
KLTELLVKVSVQFLREACEVCASLHDLLFFPYFCN

SEQ ID NO: 268 - protein, 34 aa, synthetic construct
  REGION 1..34: note = ATaRI peptide
DPVPEVAKVYERNGLLRQANGYFKTKPNGAVLGK

SEQ ID NO: 269 - protein, 10 aa, synthetic construct
  REGION 1..10: note = ATaRI peptide
SISADTHKVS

SEQ ID NO: 270 - protein, 57 aa, synthetic construct
  REGION 1..57: note = ATaRI peptide
KTARFLKSEYVWKTGVLPCLLLFCPSRLKAPAWLSIHSPSPPVVSCDIEGLGQQLRA

SEQ ID NO: 271 - protein, 28 aa, synthetic construct
  REGION 1..28: note = ATaRI peptide
QEGLDEATGEPAPLAWAPQDTPGPEAQA

SEQ ID NO: 272 - protein, 57 aa, synthetic construct
  REGION 1..57: note = ATaRI peptide
TACTTICPGKEPCPCPAPPRTLSHLLFCVPEPGQPFSPQHGEQKVLVPSPQPAAQAD

SEQ ID NO: 273 - protein, 112 aa, synthetic construct
  REGION 1..112: note = ATaRI peptide
EDTPVALKVGPAAGAHTALAGQLHDPCQNPPPQAHGSSQEPLPATSIIRSRLRPSHTETALGTGPASPRSRLEVGGRPGIPEGSDGVCPRTEGASDWEGLGLVGRDSEKADM

SEQ ID NO: 274 - protein, 25 aa, synthetic construct
  REGION 1..25: note = ATaRI peptide
QLHTTLAEVREVGATYSSCTPHWRR

SEQ ID NO: 275 - protein, 41 aa, synthetic construct
  REGION 1..41: note = ATaRI peptide
DPEGSDILVRACFSCKAGGSIQRPHASHAGEDGDFRHISSL

SEQ ID NO: 276 - protein, 18 aa, synthetic construct
  REGION 1..18: note = ATaRI peptide
EQLAPLEKVKLPISGFLP

SEQ ID NO: 277 - protein, 10 aa, synthetic construct
  REGION 1..10: note = ATaRI peptide
LDSSFSISGT

SEQ ID NO: 278 - protein, 22 aa, synthetic construct
  REGION 1..22: note = ATaRI peptide
DPDAIPSPVSAGGGCLCMSFLC

SEQ ID NO: 279 - protein, 14 aa, synthetic construct
  REGION 1..14: note = ATaRI peptide
LARLPPEEVSQGRG

SEQ ID NO: 280 - protein, 34 aa, synthetic construct
  REGION 1..34: note = ATaRI peptide
LINTDKEKVWDWKMGEGKDFSLQRKWGLYFLDGG

SEQ ID NO: 281 - protein, 20 aa, synthetic construct
  REGION 1..20: note = ATaRI peptide
LEQESRMEVRGWKEGGLGAP

SEQ ID NO: 282 - protein, 17 aa, synthetic construct
  REGION 1..17: note = ATaRI peptide
ELLPVLISGTSCLYFIL

SEQ ID NO: 283 - protein, 16 aa, synthetic construct
  REGION 1..16: note = ATaRI peptide
LRDPSASPGNPLVLLF

SEQ ID NO: 284 - protein, 43 aa, synthetic construct
  REGION 1..43: note = ATaRI peptide
AKKIDAAQVVTVIFRRGGKYFINILSHKYPIFLLCLLSFTVVG

SEQ ID NO: 285 - protein, 15 aa, synthetic construct
  REGION 1..15: note = ATaRI peptide
PTVDDRGVGKGSSAL

SEQ ID NO: 286 - protein, 24 aa, synthetic construct
  REGION 1..24: note = ATaRI peptide
SQLQDSLKVEVRSTYHFTFYASYY

SEQ ID NO: 287 - protein, 9 aa, synthetic construct
  REGION 1..9: note = ATaRI peptide
KNKLKQRLL

SEQ ID NO: 288 - protein, 24 aa, synthetic construct
  REGION 1..24: note = ATaRI peptide
QAQELSWEVRRGSHIVVASIRCGF

SEQ ID NO: 289 - protein, 17 aa, synthetic construct
  REGION 1..17: note = ATaRI peptide
LVLLLHKHRYLITPLND

SEQ ID NO: 290 - protein, 9 aa, synthetic construct
  REGION 1..9: note = ATaRI peptide
DTTFSPNTG

SEQ ID NO: 291 - protein, 26 aa, synthetic construct
  REGION 1..26: note = ATaRI peptide
SSSILRQEVKFTHSSHVCSEKKPIQI

SEQ ID NO: 292 - protein, 17 aa, synthetic construct
  REGION 1..17: note = ATaRI peptide
YSQGNVNRVCSNLIYKF

SEQ ID NO: 293 - protein, 44 aa, synthetic construct
  REGION 1..44: note = ATaRI peptide
TVHQTLMWRCVSGQGRQPRRDEGGPLGWLPWARVGPWAGGSSIF

SEQ ID NO: 294 - protein, 66 aa, synthetic construct
  REGION 1..66: note = ATaRI peptide
ITVTACCCVSVVGQGQRWHRQALFHGMRVRNTLPHSGPQPCPCVTTPVPTAAKDTASPYLCPGPVQ

SEQ ID NO: 295 - protein, 9 aa, synthetic construct
  REGION 1..9: note = ATaRI peptide
WGILNAIQQ

SEQ ID NO: 296 - protein, 10 aa, synthetic construct
  REGION 1..10: note = ATaRI peptide
NSNDYSSQGG

SEQ ID NO: 297 - protein, 56 aa, synthetic construct
  REGION 1..56: note = ATaRI peptide
SLLPPCDTVGCLSISGLLSFPRVFSSLSLKSRVSFGNFVEEPLSRMEALATSLFVL

SEQ ID NO: 298 - protein, 9 aa, synthetic construct
  REGION 1..9: note = ATaRI peptide
FICTIKTDW

SEQ ID NO: 299 - protein, 16 aa, synthetic construct
  REGION 1..16: note = ATaRI peptide
TETVSTYVVRTCRPRG

SEQ ID NO: 300 - protein, 41 aa, synthetic construct
  REGION 1..41: note = ATaRI peptide
ENICLLNFVSGHRDKSGIGCNGVQALLGRIICYLVRAGGSS

SEQ ID NO: 301 - protein, 14 aa, synthetic construct
  REGION 1..14: note = ATaRI peptide
FIAISLLQVCPRSL

SEQ ID NO: 302 - protein, 13 aa, synthetic construct
  REGION 1..13: note = ATaRI peptide
IQLLELQLVSIVV

SEQ ID NO: 303 - protein, 36 aa, synthetic construct
  REGION 1..36: note = ATaRI peptide
KVKALIFISRYLEILCTRYIKPSNHICHKRACHLFF

SEQ ID NO: 304 - protein, 10 aa, synthetic construct
  REGION 1..10: note = ATaRI peptide
SGSGLPLLVS

SEQ ID NO: 305 - protein, 34 aa, synthetic construct
  REGION 1..34: note = ATaRI peptide
LMRHENILGGYTLIQSISFLTRLVRYRWKPPYVL

SEQ ID NO: 306 - protein, 15 aa, synthetic construct
  REGION 1..15: note = ATaRI peptide
MARRCITGGGSLSSF

SEQ ID NO: 307 - protein, 23 aa, synthetic construct
  REGION 1..23: note = ATaRI peptide
RGCTVWLTGMSCSYIYIYIQIAN

SEQ ID NO: 308 - protein, 16 aa, synthetic construct
  REGION 1..16: note = ATaRI peptide
LPSLSITKVSGCRLVK

SEQ ID NO: 309 - protein, 20 aa, synthetic construct
  REGION 1..20: note = ATaRI peptide
DTAKFNCRGRYECTVLCCIT

SEQ ID NO: 310 - protein, 16 aa, synthetic construct
  REGION 1..16: note = ATaRI peptide
IDNKKRNIGQYPYYFP

SEQ ID NO: 311 - protein, 9 aa, synthetic construct
  REGION 1..9: note = ATaRI peptide
FVLYNKFIT

SEQ ID NO: 312 - protein, 22 aa, synthetic construct
  REGION 1..22: note = ATaRI peptide
PEKQDIMKVLWVFFSTVESNAP

SEQ ID NO: 313 - protein, 9 aa, synthetic construct
  REGION 1..9: note = ATaRI peptide
CGILCGKLV

SEQ ID NO: 314 - protein, 35 aa, synthetic construct
  REGION 1..35: note = ATaRI peptide
LLTLGWIHVRLTFWVSVFLCVWHAIFLLEEKFSFI

SEQ ID NO: 315 - protein, 9 aa, synthetic construct
  REGION 1..9: note = ATaRI peptide
IVCSPKHKE

SEQ ID NO: 316 - protein, 23 aa, synthetic construct
  REGION 1..23: note = ATaRI peptide
FCHKPCPPGMLHKTSRDYSESHS

SEQ ID NO: 317 - protein, 32 aa, synthetic construct
  REGION 1..32: note = ATaRI peptide
CRLCDEGHGKSLKMQLKEANLGISCRTIYKTI

SEQ ID NO: 318 - protein, 9 aa, synthetic construct
  REGION 1..9: note = ATaRI peptide
CEHCDPCTK

SEQ ID NO: 319 - protein, 22 aa, synthetic construct
  REGION 1..22: note = ATaRI peptide
ETVAINLSGKAFIILFHRDGIL

SEQ ID NO: 320 - protein, 9 aa, synthetic construct
  REGION 1..9: note = ATaRI peptide
KLNNASSRR

SEQ ID NO: 321 - protein, 39 aa, synthetic construct
  REGION 1..39: note = ATaRI peptide
QDEPPAKKGTTSAASSRRLRKLISKPVNRTRQTEGHSLV

SEQ ID NO: 322 - protein, 54 aa, synthetic construct
  REGION 1..54: note = ATaRI peptide
QQYERACKGQEQVCTSGTRKVLLFPSQGMRWGYDLLHWCPAAQTPRGSMQTGRS

SEQ ID NO: 323 - protein, 27 aa, synthetic construct
  REGION 1..27: note = ATaRI peptide
IISETSKIVSSLFCYAFLIEHSNYLID

SEQ ID NO: 324 - protein, 31 aa, synthetic construct
  REGION 1..31: note = ATaRI peptide
EISRNKIEVGIWQHSPLIYSLYPLLLNNTYK

SEQ ID NO: 325 - protein, 11 aa, synthetic construct
  REGION 1..11: note = ATaRI peptide
RKSNEMEEVNT

SEQ ID NO: 326 - protein, 14 aa, synthetic construct
  REGION 1..14: note = ATaRI peptide
SPSILQSKGLQKIN

SEQ ID NO: 327 - protein, 9 aa, synthetic construct
  REGION 1..9: note = ATaRI peptide
PRPSGHTPE

SEQ ID NO: 328 - protein, 10 aa, synthetic construct
  REGION 1..10: note = ATaRI peptide
DPSHCNVLVS

SEQ ID NO: 329 - protein, 21 aa, synthetic construct
  REGION 1..21: note = ATaRI peptide
CRAALLHGGKQVLPVQTEWSC

SEQ ID NO: 330 - protein, 10 aa, synthetic construct
  REGION 1..10: note = ATaRI peptide
LKLPSSYEVS

SEQ ID NO: 331 - protein, 15 aa, synthetic construct
  REGION 1..15: note = ATaRI peptide
RAYFILLQVREPEPS

SEQ ID NO: 332 - protein, 9 aa, synthetic construct
  REGION 1..9: note = ATaRI peptide
LVSDSLDEV

SEQ ID NO: 333 - protein, 18 aa, synthetic construct
  REGION 1..18: note = ATaRI peptide
SEFRLVGIVSFKLSTRRC

SEQ ID NO: 334 - protein, 47 aa, synthetic construct
  REGION 1..47: note = ATaRI peptide
DDLCQIMPVSIKLLISCPLMRNHLFSTCTVSPPNAILTFKYGFLLPL

SEQ ID NO: 335 - protein, 9 aa, synthetic construct
  REGION 1..9: note = ATaRI peptide
SKNETSTNW

SEQ ID NO: 336 - protein, 27 aa, synthetic construct
  REGION 1..27: note = ATaRI peptide
PSAKAVLTGKSVYSGYSRKPVKNNLAR

SEQ ID NO: 337 - protein, 9 aa, synthetic construct
  REGION 1..9: note = ATaRI peptide
ADVHAKDKG

SEQ ID NO: 338 - protein, 37 aa, synthetic construct
  REGION 1..37: note = ATaRI peptide
PQLKERLACEYKIMNVQVGYYINKLNIFSFLFVFRNV

SEQ ID NO: 339 - protein, 23 aa, synthetic construct
  REGION 1..23: note = ATaRI peptide
LHNAASYGVSSSVLPLKICGILK

SEQ ID NO: 340 - protein, 27 aa, synthetic construct
  REGION 1..27: note = ATaRI peptide
QTPLDLVSVSDGLFEKSQCFSDLLKFT

SEQ ID NO: 341 - protein, 11 aa, synthetic construct
  REGION 1..11: note = ATaRI peptide
MDIFEREQVSR

SEQ ID NO: 342 - protein, 11 aa, synthetic construct
  REGION 1..11: note = ATaRI peptide
FNRYNILKVIN

SEQ ID NO: 343 - protein, 22 aa, synthetic construct
  REGION 1..22: note = ATaRI peptide
ANERMLFHGKIPPHQLYHCLPH

SEQ ID NO: 344 - protein, 15 aa, synthetic construct
  REGION 1..15: note = ATaRI peptide
NPVPRTRQGAFKWRK

SEQ ID NO: 345 - protein, 56 aa, synthetic construct
  REGION 1..56: note = ATaRI peptide
KYALAVRQVNISSFEAYVGEFFPPYSLFSLIRRNGRRFLLLQRSQSSKICRLERVS

SEQ ID NO: 346 - protein, 10 aa, synthetic construct
  REGION 1..10: note = ATaRI peptide
LVYLQTQKVN

SEQ ID NO: 347 - protein, 55 aa, synthetic construct
  REGION 1..55: note = ATaRI peptide
EILDLIHKVHSKCICVPFPSNFCRFLKFFIIAVLLVIHISWRFEKSGDLHNETEN

SEQ ID NO: 348 - protein, 28 aa, synthetic construct
  REGION 1..28: note = ATaRI peptide
CEWAALQKVRFCPKSNKDKLSKPISISC

SEQ ID NO: 349 - protein, 17 aa, synthetic construct
  REGION 1..17: note = ATaRI peptide
QSGQENSKGIYLNFYLG

SEQ ID NO: 350 - protein, 18 aa, synthetic construct
  REGION 1..18: note = ATaRI peptide
NILVELDEVSSFFFFLML

SEQ ID NO: 351 - protein, 14 aa, synthetic construct
  REGION 1..14: note = ATaRI peptide
NTIDINNFGIHIFL

SEQ ID NO: 352 - protein, 11 aa, synthetic construct
  REGION 1..11: note = ATaRI peptide
MDSELHPLVTN

SEQ ID NO: 353 - protein, 9 aa, synthetic construct
  REGION 1..9: note = ATaRI peptide
TGPPTERIR

SEQ ID NO: 354 - protein, 16 aa, synthetic construct
  REGION 1..16: note = ATaRI peptide
ILSGTPIQVIIYYYFF

SEQ ID NO: 355 - protein, 34 aa, synthetic construct
  REGION 1..34: note = ATaRI peptide
YCTLSPLQVRNLVFIIVSGMFISRLFCMSHKTIE

SEQ ID NO: 356 - protein, 9 aa, synthetic construct
  REGION 1..9: note = ATaRI peptide
KATGHVFQV

SEQ ID NO: 357 - protein, 9 aa, synthetic construct
  REGION 1..9: note = ATaRI peptide
ATLMNAYSR

SEQ ID NO: 358 - protein, 17 aa, synthetic construct
  REGION 1..17: note = ATaRI peptide
LTKKALIKVTVNFCRVM

SEQ ID NO: 359 - protein, 9 aa, synthetic construct
  REGION 1..9: note = ATaRI peptide
VYISEENFR

SEQ ID NO: 360 - protein, 9 aa, synthetic construct
  REGION 1..9: note = ATaRI peptide
SSVQENIQQ

SEQ ID NO: 361 - protein, 21 aa, synthetic construct
  REGION 1..21: note = ATaRI peptide
EKLQLCLPGELNLSIIKRLAW

SEQ ID NO: 362 - protein, 16 aa, synthetic construct
  REGION 1..16: note = ATaRI peptide
IGETAMKQVRLKIILI

SEQ ID NO: 363 - protein, 27 aa, synthetic construct
  REGION 1..27: note = ATaRI peptide
VIFADTLQVGDNLTINGYSDHLKTYKI

SEQ ID NO: 364 - protein, 11 aa, synthetic construct
  REGION 1..11: note = ATaRI peptide
LKKWAGVFRLV

SEQ ID NO: 365 - protein, 32 aa, synthetic construct
  REGION 1..32: note = ATaRI peptide
NLDVIQCECKYYIGLFLCITRNLCLNYMKKCI

SEQ ID NO: 366 - protein, 10 aa, synthetic construct
  REGION 1..10: note = ATaRI peptide
KESLKVKKVI

SEQ ID NO: 367 - protein, 18 aa, synthetic construct
  REGION 1..18: note = ATaRI peptide
KLPDADIAGQWTTLLSKV

SEQ ID NO: 368 - protein, 49 aa, synthetic construct
  REGION 1..49: note = ATaRI peptide
VLKMDHHCRILLLSLLPEAFFSSRALYRVNGHHFSITVQRTLELRSCGA

SEQ ID NO: 369 - protein, 24 aa, synthetic construct
  REGION 1..24: note = ATaRI peptide
KLQAVANQVGCPHPTASCCSGLGV

SEQ ID NO: 370 - protein, 9 aa, synthetic construct
  REGION 1..9: note = ATaRI peptide
TATTHLSPE

SEQ ID NO: 371 - protein, 11 aa, synthetic construct
  REGION 1..11: note = ATaRI peptide
QHLWQVNRGNY

SEQ ID NO: 372 - protein, 9 aa, synthetic construct
  REGION 1..9: note = ATaRI peptide
WENPVVSSQ

SEQ ID NO: 373 - protein, 67 aa, synthetic construct
  REGION 1..67: note = ATaRI peptide
TPALTPTEVSATVRAEPAVAACGPPCYQLVFGSWAGLCCSSCYFPGLNSPEVFNNNNCNKNSYSMLH

SEQ ID NO: 374 - protein, 35 aa, synthetic construct
  REGION 1..35: note = ATaRI peptide
EEFKDAIEVGGPSPASSTQQARNWVVLELFFVFVF

SEQ ID NO: 375 - protein, 11 aa, synthetic construct
  REGION 1..11: note = ATaRI peptide
AWIHVFYKRYV

SEQ ID NO: 376 - protein, 28 aa, synthetic construct
  REGION 1..28: note = ATaRI peptide
LTDFPKLDVSDLGDFCGYVNTGFQRTSV

SEQ ID NO: 377 - protein, 19 aa, synthetic construct
  REGION 1..19: note = ATaRI peptide
GKSSFINKVGLVFIVKQII

SEQ ID NO: 378 - protein, 22 aa, synthetic construct
  REGION 1..22: note = ATaRI peptide
SAVNAERGGKRNQIVNDRWLPF

SEQ ID NO: 379 - protein, 37 aa, synthetic construct
  REGION 1..37: note = ATaRI peptide
EGGTTPSMGKCPFFPGFLIGVHRAWKQLIISFVGVLY

SEQ ID NO: 380 - protein, 19 aa, synthetic construct
  REGION 1..19: note = ATaRI peptide
KELCMSLMGKNLYLRRKSL

SEQ ID NO: 381 - protein, 17 aa, synthetic construct
  REGION 1..17: note = ATaRI peptide
EVLQLYFLGEKLHLSSY

SEQ ID NO: 382 - protein, 9 aa, synthetic construct
  REGION 1..9: note = ATaRI peptide
TFVSPQLLK

SEQ ID NO: 383 - protein, 44 aa, synthetic construct
  REGION 1..44: note = ATaRI peptide
IMASVYKKVSRIRQVSPKKIPSVNMSIDSKVEENVMEMVTYLNT

SEQ ID NO: 384 - protein, 17 aa, synthetic construct
  REGION 1..17: note = ATaRI peptide
STKSKTIQVKKKSPRRI

SEQ ID NO: 385 - protein, 11 aa, synthetic construct
  REGION 1..11: note = ATaRI peptide
NEILSGIKVRI

SEQ ID NO: 386 - protein, 15 aa, synthetic construct
  REGION 1..15: note = ATaRI peptide
MMISSMLQVGRHSHC

SEQ ID NO: 387 - protein, 10 aa, synthetic construct
  REGION 1..10: note = ATaRI peptide
AIRHDCNFGK

SEQ ID NO: 388 - protein, 9 aa, synthetic construct
  REGION 1..9: note = ATaRI peptide
HDSEATVRE

SEQ ID NO: 389 - protein, 40 aa, synthetic construct
  REGION 1..40: note = ATaRI peptide
VHGHITIKVRGNANAKASDSRMSAASCFCLTGEKALRASR

SEQ ID NO: 390 - protein, 18 aa, synthetic construct
  REGION 1..18: note = ATaRI peptide
DLAEIGEKVLGITRDLQG

SEQ ID NO: 391 - protein, 10 aa, synthetic construct
  REGION 1..10: note = ATaRI peptide
TGPEEEATGM

SEQ ID NO: 392 - protein, 17 aa, synthetic construct
  REGION 1..17: note = ATaRI peptide
KEFIETGKVNTTQKSSI

SEQ ID NO: 393 - protein, 67 aa, synthetic construct
  REGION 1..67: note = ATaRI peptide
RIVNRFAGVSISRTVRWCVYILRIFLIGRNYYVPLDNTVQFQFFCHSTCKCFLSTCCELPRILEIEG

SEQ ID NO: 394 - protein, 23 aa, synthetic construct
  REGION 1..23: note = ATaRI peptide
GIIYVSVQVGLEMAKSSFLPLYL

SEQ ID NO: 395 - protein, 9 aa, synthetic construct
  REGION 1..9: note = ATaRI peptide
VFSWITSNR

SEQ ID NO: 396 - protein, 64 aa, synthetic construct
  REGION 1..64: note = ATaRI peptide
CDIGSMEKVGGVKEGLDGRPCDQTTIGQSGEQLGPKPSSFGWRERVRALPLPWGGVGTQYQREG

SEQ ID NO: 397 - protein, 9 aa, synthetic construct
  REGION 1..9: note = ATaRI peptide
VTEAGGNLR

SEQ ID NO: 398 - protein, 9 aa, synthetic construct
  REGION 1..9: note = ATaRI peptide
TSGLKNYLR

SEQ ID NO: 399 - protein, 14 aa, synthetic construct
  REGION 1..14: note = ATaRI peptide
TPCLAEPDSKCTRP

SEQ ID NO: 400 - protein, 11 aa, synthetic construct
  REGION 1..11: note = ATaRI peptide
QDMDIAGLRWE

SEQ ID NO: 401 - protein, 24 aa, synthetic construct
  REGION 1..24: note = ATaRI peptide
PQGAIFSNGKYVNSLCLSLSSWGG

SEQ ID NO: 402 - protein, 16 aa, synthetic construct
  REGION 1..16: note = ATaRI peptide
PLSQRRKAGALISRTV

SEQ ID NO: 403 - protein, 11 aa, synthetic construct
  REGION 1..11: note = ATaRI peptide
RGTSYIEEGMF

SEQ ID NO: 404 - protein, 27 aa, synthetic construct
  REGION 1..27: note = ATaRI peptide
NDLSERLHCKYGRTPFIRNTAFILRQF

SEQ ID NO: 405 - protein, 22 aa, synthetic construct
  REGION 1..22: note = ATaRI peptide
RYPHLLEQVNTFLKLTTLNSAL

SEQ ID NO: 406 - protein, 10 aa, synthetic construct
  REGION 1..10: note = ATaRI peptide
KFKEDDTRGI

SEQ ID NO: 407 - protein, 12 aa, synthetic construct
  REGION 1..12: note = ATaRI peptide
ELFETIARVCDS

SEQ ID NO: 408 - protein, 11 aa, synthetic construct
  REGION 1..11: note = ATaRI peptide
KLGKRLEEVSI

SEQ ID NO: 409 - protein, 18 aa, synthetic construct
  REGION 1..18: note = ATaRI peptide
WVRQLELKVFILIKDEEY

SEQ ID NO: 410 - protein, 9 aa, synthetic construct
  REGION 1..9: note = ATaRI peptide
KQAIILKQV

SEQ ID NO: 411 - protein, 9 aa, synthetic construct
  REGION 1..9: note = ATaRI peptide
SAVLHQHKV

SEQ ID NO: 412 - protein, 14 aa, synthetic construct
  REGION 1..14: note = ATaRI peptide
GKEVERLPRYWRLM

SEQ ID NO: 413 - protein, 32 aa, synthetic construct
  REGION 1..32: note = ATaRI peptide
SHLKKLFAGRIQHLFNRYLLSFNCLPGLILCS

SEQ ID NO: 414 - protein, 34 aa, synthetic construct
  REGION 1..34: note = ATaRI peptide
DPSLFPSQVRGLTCRSYIGMERGKIPDLEARRLR

SEQ ID NO: 415 - protein, 28 aa, synthetic construct
  REGION 1..28: note = ATaRI peptide
SSEDPGNTGMEKTFPFLPGFGLFFGILS

SEQ ID NO: 416 - protein, 23 aa, synthetic construct
  REGION 1..23: note = ATaRI peptide
NKSGTTQNGMIDYSKYINLFLKT

SEQ ID NO: 417 - protein, 9 aa, synthetic construct
  REGION 1..9: note = ATaRI peptide
SRMGMIFLR

SEQ ID NO: 418 - protein, 10 aa, synthetic construct
  REGION 1..10: note = ATaRI peptide
ALQWVLKQVN

SEQ ID NO: 419 - protein, 20 aa, synthetic construct
  REGION 1..20: note = ATaRI peptide
SMVQVYEQVDMHLNCSFHVY

SEQ ID NO: 420 - protein, 9 aa, synthetic construct
  REGION 1..9: note = ATaRI peptide
LKRQSHLQV

SEQ ID NO: 421 - protein, 9 aa, synthetic construct
  REGION 1..9: note = ATaRI peptide
ETEQAGLES

SEQ ID NO: 422 - protein, 9 aa, synthetic construct
  REGION 1..9: note = ATaRI peptide
QKVSELKEK

SEQ ID NO: 423 - protein, 41 aa, synthetic construct
  REGION 1..41: note = ATaRI peptide
SWLPVLEKVDSDKCTNNIYYTQLSNLQGTSVLKCHALFMMI

SEQ ID NO: 424 - protein, 26 aa, synthetic construct
  REGION 1..26: note = ATaRI peptide
SSLKITYEVRRFKTWITSCMKAVLYT

SEQ ID NO: 425 - protein, 11 aa, synthetic construct
  REGION 1..11: note = ATaRI peptide
NIIDRLFDGKF

SEQ ID NO: 426 - protein, 19 aa, synthetic construct
  REGION 1..19: note = ATaRI peptide
PQSCSILVGKMNDFQSISR

SEQ ID NO: 427 - protein, 41 aa, synthetic construct
  REGION 1..41: note = ATaRI peptide
APPEEGLPGMELWLEVGSQVWADRELVRAFFWLGLFPLIVF

SEQ ID NO: 428 - protein, 9 aa, synthetic construct
  REGION 1..9: note = ATaRI peptide
LALITDGPT

SEQ ID NO: 429 - protein, 19 aa, synthetic construct
  REGION 1..19: note = ATaRI peptide
SHGLLLKKVTRSLSGARPE

SEQ ID NO: 430 - protein, 84 aa, synthetic construct
  REGION 1..84: note = ATaRI peptide
LQSGLSHQVWSVTVLPVSLLGRLPAVCQEPSRHWGSVMNIAGRASETLRHRERRRGSLLCFHGCFLTLLRPLRLLGEAFPDRPF

SEQ ID NO: 431 - protein, 16 aa, synthetic construct
  REGION 1..16: note = ATaRI peptide
PNNIPALLGKWSLATC

SEQ ID NO: 432 - protein, 11 aa, synthetic construct
  REGION 1..11: note = ATaRI peptide
VLELNNKEVCK

SEQ ID NO: 433 - protein, 28 aa, synthetic construct
  REGION 1..28: note = ATaRI peptide
QYISAVQMVIASLSRYFYILFIVKQMFS

SEQ ID NO: 434 - protein, 14 aa, synthetic construct
  REGION 1..14: note = ATaRI peptide
KRGGGGGRVRYNSC

SEQ ID NO: 435 - protein, 9 aa, synthetic construct
  REGION 1..9: note = ATaRI peptide
DKLKIADEG

SEQ ID NO: 436 - protein, 91 aa, synthetic construct
  REGION 1..91: note = ATaRI peptide
HGGTGAVQVGTPGTLGTAPPPQPARTPLPQASAPPALVGRGSGPSLSKVQTLHSRFPFAPPLPGTTSSSAISHFFLWRPFPAPPFHLSFPA

SEQ ID NO: 437 - protein, 17 aa, synthetic construct
  REGION 1..17: note = ATaRI peptide
VEDSIVRKVRLFFSLFS

SEQ ID NO: 438 - protein, 11 aa, synthetic construct
  REGION 1..11: note = ATaRI peptide
VIGVRESYGMF

SEQ ID NO: 439 - protein, 29 aa, synthetic construct
  REGION 1..29: note = ATaRI peptide
IEAKLKEVVHEFFVFQLLKLPYFEFVFCL

SEQ ID NO: 440 - protein, 13 aa, synthetic construct
  REGION 1..13: note = ATaRI peptide
ENMVEWLRVSKFF

SEQ ID NO: 441 - protein, 37 aa, synthetic construct
  REGION 1..37: note = ATaRI peptide
YLNWDAVFRYSIQIYFTVFIFLFHIYFCCDITFVCKS

SEQ ID NO: 442 - protein, 9 aa, synthetic construct
  REGION 1..9: note = ATaRI peptide
TEVPPILHR

SEQ ID NO: 443 - protein, 12 aa, synthetic construct
  REGION 1..12: note = ATaRI peptide
NFFQSVPEWYVI

SEQ ID NO: 444 - protein, 18 aa, synthetic construct
  REGION 1..18: note = ATaRI peptide
RCLSNCTKVRFSSSCFVF

SEQ ID NO: 445 - protein, 32 aa, synthetic construct
  REGION 1..32: note = ATaRI peptide
IADICKSLVSMLPVLLSYFDSNRHNFFVEISL

SEQ ID NO: 446 - protein, 13 aa, synthetic construct
  REGION 1..13: note = ATaRI peptide
TKSLHLHMVSYVK

SEQ ID NO: 447 - protein, 16 aa, synthetic construct
  REGION 1..16: note = ATaRI peptide
HTGEKEVLGKLQSCAA

SEQ ID NO: 448 - protein, 9 aa, synthetic construct
  REGION 1..9: note = ATaRI peptide
KLPIPEYAL

SEQ ID NO: 449 - protein, 9 aa, synthetic construct
  REGION 1..9: note = ATaRI peptide
DLAYGLTDR

SEQ ID NO: 450 - protein, 64 aa, synthetic construct
  REGION 1..64: note = ATaRI peptide
ASDLDLRGGKVLWLLASFSCSACRGENIRALFSDPFCGCQQLDQTGQRRLGTSSTLASWLAKLI

SEQ ID NO: 451 - protein, 9 aa, synthetic construct
  REGION 1..9: note = ATaRI peptide
TDGSISQFR

SEQ ID NO: 452 - protein, 64 aa, synthetic construct
  REGION 1..64: note = ATaRI peptide
KKTFKESRGIYKTLLGKMNNQAPLITNYPWLNSLLCSFPQLPKNRTRQGMCGFAKAVLNARFHQ

SEQ ID NO: 453 - protein, 9 aa, synthetic construct
  REGION 1..9: note = ATaRI peptide
PHIIKLYQV

SEQ ID NO: 454 - protein, 51 aa, synthetic construct
  REGION 1..51: note = ATaRI peptide
EGPQLDIWVLLCFAVLLNASILIILGVLAHLRSSWYLTHKQYFIFSPSTGL

SEQ ID NO: 455 - protein, 30 aa, synthetic construct
  REGION 1..30: note = ATaRI peptide
RIPYFMSEGNQLFILLMVFYSVSAPSEMPR

SEQ ID NO: 456 - protein, 10 aa, synthetic construct
  REGION 1..10: note = ATaRI peptide
IDQQKTIEVK

SEQ ID NO: 457 - protein, 15 aa, synthetic construct
  REGION 1..15: note = ATaRI peptide
QLVVMPGAGTVEERH

SEQ ID NO: 458 - protein, 34 aa, synthetic construct
  REGION 1..34: note = ATaRI peptide
DLASSCPQVGTLGPSLNGSVRMRCEFVLKMVIFT

SEQ ID NO: 459 - protein, 33 aa, synthetic construct
  REGION 1..33: note = ATaRI peptide
LAYLIEIVGQLALDSDTRVHRSESGLLYPSYAL

SEQ ID NO: 460 - protein, 42 aa, synthetic construct
  REGION 1..42: note = ATaRI peptide
GVNPEEQLVSSIFCDWTLNLYVFYLYLAFDTAVHAFLKCCLP

SEQ ID NO: 461 - protein, 10 aa, synthetic construct
  REGION 1..10: note = ATaRI peptide
CMKREADEVT

SEQ ID NO: 462 - protein, 17 aa, synthetic construct
  REGION 1..17: note = ATaRI peptide
TQKKQERKVTLLLWYLS

SEQ ID NO: 463 - protein, 12 aa, synthetic construct
  REGION 1..12: note = ATaRI peptide
FVPSKVAPVSYV

SEQ ID NO: 464 - protein, 17 aa, synthetic construct
  REGION 1..17: note = ATaRI peptide
LVRKELNKVKVLKIPTF

SEQ ID NO: 465 - protein, 9 aa, synthetic construct
  REGION 1..9: note = ATaRI peptide
RKMLPSSSR

SEQ ID NO: 466 - protein, 69 aa, synthetic construct
  REGION 1..69: note = ATaRI peptide
ADLKKYMEVMACWVLIMCYSLTVIFGGPLSTSPTSYLLRFHDFVNRTGCGCWGIVGRTARMASKGVLVT

SEQ ID NO: 467 - protein, 23 aa, synthetic construct
  REGION 1..23: note = ATaRI peptide
RENKVLADGNCQSLLFNGWDDLC

SEQ ID NO: 468 - protein, 11 aa, synthetic construct
  REGION 1..11: note = ATaRI peptide
LALKNYSVVSS

SEQ ID NO: 469 - protein, 12 aa, synthetic construct
  REGION 1..12: note = ATaRI peptide
WQAVCSRNGKPG

SEQ ID NO: 470 - protein, 9 aa, synthetic construct
  REGION 1..9: note = ATaRI peptide
IINHLDLTR

SEQ ID NO: 471 - protein, 9 aa, synthetic construct
  REGION 1..9: note = ATaRI peptide
FTDLALEER

SEQ ID NO: 472 - protein, 10 aa, synthetic construct
  REGION 1..10: note = ATaRI peptide
GDGCLSLLVC

SEQ ID NO: 473 - protein, 64 aa, synthetic construct
  REGION 1..64: note = ATaRI peptide
SQDGGILTVSFSQGNPEAASIVLVLFCFVLFYYQCNLFEVATFENLLTLRYGVDILFRIMYTST

SEQ ID NO: 474 - protein, 22 aa, synthetic construct
  REGION 1..22: note = ATaRI peptide
AMESLLVARYLKCTEILHHYFL

SEQ ID NO: 475 - protein, 9 aa, synthetic construct
  REGION 1..9: note = ATaRI peptide
DEGLPDGLR

SEQ ID NO: 476 - protein, 13 aa, synthetic construct
  REGION 1..13: note = ATaRI peptide
EEEMKNHQVFCLY

SEQ ID NO: 477 - protein, 51 aa, synthetic construct
  REGION 1..51: note = ATaRI peptide
ETYIPSEQGNKSVKRPVVYCVCFLRTGIVWFIFILSVQSMVHVQSCLVYSG

SEQ ID NO: 478 - protein, 9 aa, synthetic construct
  REGION 1..9: note = ATaRI peptide
PLPGEWKPW

SEQ ID NO: 479 - protein, 30 aa, synthetic construct
  REGION 1..30: note = ATaRI peptide
RDPPKSSLVSQWMPPPREARAEIWRDVGNL

SEQ ID NO: 480 - protein, 16 aa, synthetic construct
  REGION 1..16: note = ATaRI peptide
GKMQHLNQVGFLVSMA

SEQ ID NO: 481 - protein, 27 aa, synthetic construct
  REGION 1..27: note = ATaRI peptide
DEEESDNQVMMKSSPWPGNPLCHIFSF

SEQ ID NO: 482 - protein, 14 aa, synthetic construct
  REGION 1..14: note = ATaRI peptide
EGSSDASQVSHCIP

SEQ ID NO: 483 - protein, 12 aa, synthetic construct
  REGION 1..12: note = ATaRI peptide
DPKSFHGLVSLR

SEQ ID NO: 484 - protein, 32 aa, synthetic construct
  REGION 1..32: note = ATaRI peptide
VLGGACRQVSFCGWWAELGPHFPSQLFRMTQN

SEQ ID NO: 485 - protein, 84 aa, synthetic construct
  REGION 1..84: note = ATaRI peptide
AREQYEAEVAQPHPLRACTHMHTHMHAHAHTHAHTHARTCTHTPGSFPPGCGAEEGDKLWSGIVGGFPSWYPATMMFFAFFIKT

SEQ ID NO: 486 - protein, 14 aa, synthetic construct
  REGION 1..14: note = ATaRI peptide
LDMSNVEQVIFLRS

SEQ ID NO: 487 - protein, 31 aa, synthetic construct
  REGION 1..31: note = ATaRI peptide
VQEANIHQVELFTRVSQPPDLKRVFSESRYR

SEQ ID NO: 488 - protein, 9 aa, synthetic construct
  REGION 1..9: note = ATaRI peptide
TIFTGSIER

SEQ ID NO: 489 - protein, 33 aa, synthetic construct
  REGION 1..33: note = ATaRI peptide
SNLAERIKVRKRRNCLLISLRTTLSARHDGSSL

SEQ ID NO: 490 - protein, 29 aa, synthetic construct
  REGION 1..29: note = ATaRI peptide
DCAKLFAKGTQKSQFCQLSEVVLGVLEVN

SEQ ID NO: 491 - protein, 40 aa, synthetic construct
  REGION 1..40: note = ATaRI peptide
SHLLRYRQVGQVSFFSESLFLGSLYLVFFFCFTSFSSLNF

SEQ ID NO: 492 - protein, 30 aa, synthetic construct
  REGION 1..30: note = ATaRI peptide
DQGNYTSVVCFYSEPSEFLVPIKLLWTFGA

SEQ ID NO: 493 - protein, 9 aa, synthetic construct
  REGION 1..9: note = ATaRI peptide
TTSLTSGTG

SEQ ID NO: 494 - protein, 25 aa, synthetic construct
  REGION 1..25: note = ATaRI peptide
AKASRQLQVTPPSLPVLPSLCTCPL

SEQ ID NO: 495 - protein, 13 aa, synthetic construct
  REGION 1..13: note = ATaRI peptide
GFPRRIQTSIQIH

SEQ ID NO: 496 - protein, 17 aa, synthetic construct
  REGION 1..17: note = ATaRI peptide
DGAVQQYIRSVWRHFGI

SEQ ID NO: 497 - protein, 9 aa, synthetic construct
  REGION 1..9: note = ATaRI peptide
EHPSLELLQ

SEQ ID NO: 498 - protein, 22 aa, synthetic construct
  REGION 1..22: note = ATaRI peptide
TFIDVEDEVNICYFKVFFINPH

SEQ ID NO: 499 - protein, 9 aa, synthetic construct
  REGION 1..9: note = ATaRI peptide
FWRKAFGEK

SEQ ID NO: 500 - protein, 11 aa, synthetic construct
  REGION 1..11: note = ATaRI peptide
DIFTRLFQVGH

SEQ ID NO: 501 - protein, 12 aa, synthetic construct
  REGION 1..12: note = ATaRI peptide
QKFIHKPGRSVQ

SEQ ID NO: 502 - protein, 16 aa, synthetic construct
  REGION 1..16: note = ATaRI peptide
TFSLDTSMVSLNFETI

SEQ ID NO: 503 - protein, 9 aa, synthetic construct
  REGION 1..9: note = ATaRI peptide
GYYSSAFAR

SEQ ID NO: 504 - protein, 17 aa, synthetic construct
  REGION 1..17: note = ATaRI peptide
EIERNTCKVEFHHFIFN

SEQ ID NO: 505 - protein, 19 aa, synthetic construct
  REGION 1..19: note = ATaRI peptide
EAVEMAYKVCLIASLAFTY

SEQ ID NO: 506 - protein, 21 aa, synthetic construct
  REGION 1..21: note = ATaRI peptide
EGFFRSNKVCHLLFHYYFLCW

SEQ ID NO: 507 - protein, 9 aa, synthetic construct
  REGION 1..9: note = ATaRI peptide
DDGAVIFYR

SEQ ID NO: 508 - protein, 52 aa, synthetic construct
  REGION 1..52: note = ATaRI peptide
EAMAKLRQVSAPPGLPGPGPDPQQTRPRSHPADPAQILTCRPDPCSQPSSKL

SEQ ID NO: 509 - protein, 12 aa, synthetic construct
  REGION 1..12: note = ATaRI peptide
VFVQSVKEGKAF

SEQ ID NO: 510 - protein, 14 aa, synthetic construct
  REGION 1..14: note = ATaRI peptide
QTGDRIIKVRNRLL

SEQ ID NO: 511 - protein, 16 aa, synthetic construct
  REGION 1..16: note = ATaRI peptide
ITSPVLMGVRMGKFLS

SEQ ID NO: 512 - protein, 30 aa, synthetic construct
  REGION 1..30: note = ATaRI peptide
DFGTEHEQVMTFFFLKNRLLLSAISDLLQK

SEQ ID NO: 513 - protein, 14 aa, synthetic construct
  REGION 1..14: note = ATaRI peptide
SQFDPATLVIYFTI

SEQ ID NO: 514 - protein, 9 aa, synthetic construct
  REGION 1..9: note = ATaRI peptide
VQRHLEDFR

SEQ ID NO: 515 - protein, 10 aa, synthetic construct
  REGION 1..10: note = ATaRI peptide
SALTDKHSGM

SEQ ID NO: 516 - protein, 50 aa, synthetic construct
  REGION 1..50: note = ATaRI peptide
FVTRHPINVSGVCLRMGRSIIVFMQRSEEGCCRDGLLEWIFYGASLKSGL

SEQ ID NO: 517 - protein, 26 aa, synthetic construct
  REGION 1..26: note = ATaRI peptide
FQDLKEETGGTFTFLPTRPRSKVCSF

SEQ ID NO: 518 - protein, 74 aa, synthetic construct
  REGION 1..74: note = ATaRI peptide
LVGDSLLEVLPELGAPMFLCETDPTFVFWQAVSAVVQRGEDRLSASWQDSAKPVPASEPVLLLHSEEPILPLCS

SEQ ID NO: 519 - protein, 33 aa, synthetic construct
  REGION 1..33: note = ATaRI peptide
KGFTNLDEVCVHSVALNRGSFPDNQWPQAASLW

SEQ ID NO: 520 - protein, 21 aa, synthetic construct
  REGION 1..21: note = ATaRI peptide
RNPSLMKQVSHVKYSLDLTSW

SEQ ID NO: 521 - protein, 9 aa, synthetic construct
  REGION 1..9: note = ATaRI peptide
GTDLRKSQP

SEQ ID NO: 522 - protein, 47 aa, synthetic construct
  REGION 1..47: note = ATaRI peptide
WQNALLEKVSTAEFAFTVGLAISREAFVSSGFWESPTDSILPLMVLA

SEQ ID NO: 523 - protein, 9 aa, synthetic construct
  REGION 1..9: note = ATaRI peptide
PDDDFNTMG

SEQ ID NO: 524 - protein, 14 aa, synthetic construct
  REGION 1..14: note = ATaRI peptide
GSSEAPVSVWAVSL

SEQ ID NO: 525 - protein, 36 aa, synthetic construct
  REGION 1..36: note = ATaRI peptide
QSGQGHGVCESDPRSAGPLLETPSQNLSPSCSPFPV

SEQ ID NO: 526 - protein, 9 aa, synthetic construct
  REGION 1..9: note = ATaRI peptide
FLKAKEERR

SEQ ID NO: 527 - protein, 13 aa, synthetic construct
  REGION 1..13: note = ATaRI peptide
GKENNKLEGTLGR

SEQ ID NO: 528 - protein, 15 aa, synthetic construct
  REGION 1..15: note = ATaRI peptide
SMYFSAVMVRMPSVW

SEQ ID NO: 529 - protein, 10 aa, synthetic construct
  REGION 1..10: note = ATaRI peptide
FGQVYTEASE

SEQ ID NO: 530 - protein, 61 aa, synthetic construct
  REGION 1..61: note = ATaRI peptide
WYNKPLKKGNILKLQVCLFFCGRKGNCKVIITSQQHMIAMISVLMEIIMSSRKKYRNNFVY

SEQ ID NO: 531 - protein, 17 aa, synthetic construct
  REGION 1..17: note = ATaRI peptide
RTSHQKAQVNKRRESAE

SEQ ID NO: 532 - protein, 19 aa, synthetic construct
  REGION 1..19: note = ATaRI peptide
LDLTDEKKVKSKALVPSSG

SEQ ID NO: 533 - protein, 41 aa, synthetic construct
  REGION 1..41: note = ATaRI peptide
VLRNTEVMVSGADLAGLRNSFLGNLSKYAIDLKGEHLLFIK

SEQ ID NO: 534 - protein, 12 aa, synthetic construct
  REGION 1..12: note = ATaRI peptide
RRMKWKKMVRKE

SEQ ID NO: 535 - protein, 59 aa, synthetic construct
  REGION 1..59: note = ATaRI peptide
IDCTWNIEVGAMGRVNVCVCEHVCARVCVSLCRCVWMCVHVFAYVCMCVCVCVCAYVCV

SEQ ID NO: 536 - protein, 9 aa, synthetic construct
  REGION 1..9: note = ATaRI peptide
PLGDAMINM

SEQ ID NO: 537 - protein, 9 aa, synthetic construct
  REGION 1..9: note = ATaRI peptide
HQGRIKNAR

SEQ ID NO: 538 - protein, 34 aa, synthetic construct
  REGION 1..34: note = ATaRI peptide
VQHMKTLRGETLGSIVLYVLAHKCYHPCLECSYP

SEQ ID NO: 539 - protein, 58 aa, synthetic construct
  REGION 1..58: note = ATaRI peptide
RERLIDAKSEYQRGLAFPQQPTHRQPTLSEQRAGVCDGLSLSSPTSLSSFWGTRAIFG

SEQ ID NO: 540 - protein, 15 aa, synthetic construct
  REGION 1..15: note = ATaRI peptide
PSTCSKKKGNNLTVH

SEQ ID NO: 541 - protein, 25 aa, synthetic construct
  REGION 1..25: note = ATaRI peptide
HLAECHRQGKLGCMKDLKLKVSPCF

SEQ ID NO: 542 - protein, 53 aa, synthetic construct
  REGION 1..53: note = ATaRI peptide
KKIRLGIEGKTFSLFSISFLFKTKRLKTIGSYLEYSWNTLRKTLTNDYHMLMQ

SEQ ID NO: 543 - protein, 12 aa, synthetic construct
  REGION 1..12: note = ATaRI peptide
VFFDNKIQGMIL

SEQ ID NO: 544 - protein, 9 aa, synthetic construct
  REGION 1..9: note = ATaRI peptide
IEFEYNKSK

SEQ ID NO: 545 - protein, 144 aa, synthetic construct
  REGION 1..144: note = ATaRI peptide
RSLTSCIDRKDLLAGSRTGVQNPGGHMSARGCSLPVPSSHPGVSSPSGQSPPRPGSLLRPVTPGLAAPSGRSPPSGSPSGPSPLPGSSSGRSPPPRSSSGRSPPPRSSSGRSPPAGSPPAGHPPAGSPPARVLLRPVTLGCLEK

SEQ ID NO: 546 - protein, 230 aa, synthetic construct
  REGION 1..230: note = ATaRI peptide
SWASWCSAGERELRAAPAGPHIPQPSAPRVLSSRDPRIPSSRGEQPQLLLSGSSPIPPSSPAAAGTLLLPRDPGLWATPGVPSGAGVCAPSRPPRRACDAGLCPPWTPAALQPSEPSQTHPIAAPSPLLRGELPLPFPQAPLFLPSLWEAPYSAEAGASAWQVWSSQLAWQGRKNSVRGPPRSRAMIYLHSRTDRSSLSTFPPFTCYQLTLSSPPFPNVVYGKGVASVIL

SEQ ID NO: 547 - protein, 48 aa, synthetic construct
  REGION 1..48: note = ATaRI peptide
PKKLIDSLEYVCLKFIYIYFDPKRGQGGRIMRSGVQEQPGQHSETPSH

SEQ ID NO: 548 - protein, 18 aa, synthetic construct
  REGION 1..18: note = ATaRI peptide
HCGLGFSEVVINLFSLGR

SEQ ID NO: 549 - protein, 24 aa, synthetic construct
  REGION 1..24: note = ATaRI peptide
NKELEEKNRWEEKNSLLKEILGSL

SEQ ID NO: 550 - protein, 25 aa, synthetic construct
  REGION 1..25: note = ATaRI peptide
SIFRTYPAGKKNQFFQMVKIYGYIL

SEQ ID NO: 551 - protein, 9 aa, synthetic construct
  REGION 1..9: note = ATaRI peptide
NCDIVKATQ

SEQ ID NO: 552 - protein, 49 aa, synthetic construct
  REGION 1..49: note = ATaRI peptide
AYLISKGQVCSEMCLILQFLSSEEVGEIISSSLFSFLKWRLMDIQIFRY

SEQ ID NO: 553 - protein, 18 aa, synthetic construct
  REGION 1..18: note = ATaRI peptide
WRWLQKCEVFSYGVFSMG

SEQ ID NO: 554 - protein, 57 aa, synthetic construct
  REGION 1..57: note = ATaRI peptide
LLLNQLFQVFISLLIMALSKISKTCSETALNLKSEDAHSVFTSVTDSVGLAMSFNHT

SEQ ID NO: 555 - protein, 9 aa, synthetic construct
  REGION 1..9: note = ATaRI peptide
LSLRKTPYK

SEQ ID NO: 556 - protein, 15 aa, synthetic construct
  REGION 1..15: note = ATaRI peptide
KAQAEMQSRWGLLAN

SEQ ID NO: 557 - protein, 20 aa, synthetic construct
  REGION 1..20: note = ATaRI peptide
TLGQKKISRLDFLCVLQSMV

SEQ ID NO: 558 - protein, 17 aa, synthetic construct
  REGION 1..17: note = ATaRI peptide
LRGTQVTHRYLQCELLY

SEQ ID NO: 559 - protein, 9 aa, synthetic construct
  REGION 1..9: note = ATaRI peptide
STLPRKQDR

SEQ ID NO: 560 - protein, 10 aa, synthetic construct
  REGION 1..10: note = ATaRI peptide
TRFNFSQLGE

SEQ ID NO: 561 - protein, 28 aa, synthetic construct
  REGION 1..28: note = ATaRI peptide
NTPELNCKGKVRETAFSQKTCLPLGALP

SEQ ID NO: 562 - protein, 9 aa, synthetic construct
  REGION 1..9: note = ATaRI peptide
LRNSHSNSL

SEQ ID NO: 563 - protein, 26 aa, synthetic construct
  REGION 1..26: note = ATaRI peptide
QEEMKWKEVSWIPFPALPVPPPGRTT

SEQ ID NO: 564 - protein, 20 aa, synthetic construct
  REGION 1..20: note = ATaRI peptide
GVVRRLFKVSVSRQRLQHTT

SEQ ID NO: 565 - protein, 10 aa, synthetic construct
  REGION 1..10: note = ATaRI peptide
TTISVTVKGN

SEQ ID NO: 566 - protein, 13 aa, synthetic construct
  REGION 1..13: note = ATaRI peptide
NVDHKSSKVRRSF

SEQ ID NO: 567 - protein, 28 aa, synthetic construct
  REGION 1..28: note = ATaRI peptide
SDAEGDPLVSPQPPEQLSIPLALTVCWV

SEQ ID NO: 568 - protein, 24 aa, synthetic construct
  REGION 1..24: note = ATaRI peptide
DEEAYKNVVGISAGTQMDPQDSAR

SEQ ID NO: 569 - protein, 10 aa, synthetic construct
  REGION 1..10: note = ATaRI peptide
IDSMVHKHGE

SEQ ID NO: 570 - protein, 9 aa, synthetic construct
  REGION 1..9: note = ATaRI peptide
AREDLQKMK

SEQ ID NO: 571 - protein, 23 aa, synthetic construct
  REGION 1..23: note = ATaRI peptide
GIHEEMLKVRKEHKCVKSILKEK

SEQ ID NO: 572 - protein, 33 aa, synthetic construct
  REGION 1..33: note = ATaRI peptide
ISEPCGIKVGVLPTLFFIMVLLFFLVQHLKIIY

SEQ ID NO: 573 - protein, 9 aa, synthetic construct
  REGION 1..9: note = ATaRI peptide
RLEELYTKK

SEQ ID NO: 574 - protein, 122 aa, synthetic construct
  REGION 1..122: note = ATaRI peptide
GKVWRGPLGECGLSQPSPNTAGMHCCSFRHPSSCPEMRPSPTVSFWDSQESFPGLRGRCCGCISWRAPRSQGGAFWWFGFWIGGCWVGLHGCSWGCQACKVDRPLDLSVAVDEGSVAIRGDV

SEQ ID NO: 575 - protein, 79 aa, synthetic construct
  REGION 1..79: note = ATaRI peptide
ADALWWGVVSRKLPGMGTGAAQAEEWAGHLGTGVLRLRALAGASHLHAHRPLSTNLCLEPLAQVPTLSVESFGITILKF

SEQ ID NO: 576 - protein, 229 aa, synthetic construct
  REGION 1..229: note = ATaRI peptide
RLNRVEDKVGSRAGLRWFWLASWGQQAPPCGLRVNVKLLQASPPSRQCLLQPAQQLPRGAQAHCPPGGALVPHGRSQARLVSHPLTSGVFTGRWHQVPPPPSSFPLPLVVCFVLCEPPGCVLSGGWQKLASHPSLLLGPAVWGLHLGPAEGSGRCRAQLGWVHGKRGIFCSPRTHQAPTPHQALCPSLGPSGRSLSPRHPGSCRGIWAVGGPFSGPWLSPPLPFEVSVV

SEQ ID NO: 577 - protein, 9 aa, synthetic construct
  REGION 1..9: note = ATaRI peptide
KNATAGSDR

SEQ ID NO: 578 - protein, 31 aa, synthetic construct
  REGION 1..31: note = ATaRI peptide
KYQKLILMVSLFFQILNHEGKKINFYMKPQI

SEQ ID NO: 579 - protein, 9 aa, synthetic construct
  REGION 1..9: note = ATaRI peptide
WSPPSEDLR

SEQ ID NO: 580 - protein, 22 aa, synthetic construct
  REGION 1..22: note = ATaRI peptide
LEGELIHDVSSLSFNVKNVLLS

SEQ ID NO: 581 - protein, 20 aa, synthetic construct
  REGION 1..20: note = ATaRI peptide
IFVDEDKTVMWLIMLIGWKC

SEQ ID NO: 582 - protein, 20 aa, synthetic construct
  REGION 1..20: note = ATaRI peptide
IEDIETFKVMSVFTSVKVIV

SEQ ID NO: 583 - protein, 12 aa, synthetic construct
  REGION 1..12: note = ATaRI peptide
MQALEKSNGTVF

SEQ ID NO: 584 - protein, 43 aa, synthetic construct
  REGION 1..43: note = ATaRI peptide
LHLDQSFKVFPSDDLLAKLNGSHSLKYNRKEIYENYSLTTFFT

SEQ ID NO: 585 - protein, 14 aa, synthetic construct
  REGION 1..14: note = ATaRI peptide
KTTTKSAQVSVIDY

SEQ ID NO: 586 - protein, 17 aa, synthetic construct
  REGION 1..17: note = ATaRI peptide
ILKAYSDSQYVEIHIII

SEQ ID NO: 587 - protein, 9 aa, synthetic construct
  REGION 1..9: note = ATaRI peptide
KPVELPENR

SEQ ID NO: 588 - protein, 9 aa, synthetic construct
  REGION 1..9: note = ATaRI peptide
ILLTDMHLP

SEQ ID NO: 589 - protein, 21 aa, synthetic construct
  REGION 1..21: note = ATaRI peptide
DDPIRRIMGTFGEGRQQGCAL

SEQ ID NO: 590 - protein, 23 aa, synthetic construct
  REGION 1..23: note = ATaRI peptide
EKPVCGTTCEYHCDNFDFITRNL

SEQ ID NO: 591 - protein, 9 aa, synthetic construct
  REGION 1..9: note = ATaRI peptide
YKKELGFSR

SEQ ID NO: 592 - protein, 13 aa, synthetic construct
  REGION 1..13: note = ATaRI peptide
TFGMCVLQVGGFL

SEQ ID NO: 593 - protein, 15 aa, synthetic construct
  REGION 1..15: note = ATaRI peptide
KQLYTVTMVSICFLT

SEQ ID NO: 594 - protein, 9 aa, synthetic construct
  REGION 1..9: note = ATaRI peptide
DVVGRFNER

SEQ ID NO: 595 - protein, 9 aa, synthetic construct
  REGION 1..9: note = ATaRI peptide
AIAGAVAFG

SEQ ID NO: 596 - protein, 9 aa, synthetic construct
  REGION 1..9: note = ATaRI peptide
VFMASTING

SEQ ID NO: 597 - protein, 27 aa, synthetic construct
  REGION 1..27: note = ATaRI peptide
TTTARLASGTPEPDPGPAVHSKALQSY

SEQ ID NO: 598 - protein, 40 aa, synthetic construct
  REGION 1..40: note = ATaRI peptide
LYVASHYKVTAASPCVNGSRELQHLAVPFYLICIFYYPMA

SEQ ID NO: 599 - protein, 75 aa, synthetic construct
  REGION 1..75: note = ATaRI peptide
EIHTVSSEVSIFRQTSCVLVLGRIILWVFRGINKNQSRALDPSLIFFCCFLLPNTLDPQISIIGIIWQLVKNVNS

SEQ ID NO: 600 - protein, 9 aa, synthetic construct
  REGION 1..9: note = ATaRI peptide
KLKSMDLSE

SEQ ID NO: 601 - protein, 73 aa, synthetic construct
  REGION 1..73: note = ATaRI peptide
VNTYKYAKVRAKDACWPPPTTCSAPRGPRPCGCTGDELGDAGDQAASEGSVEAEGGLATPCVAWGHCCPLAMW

SEQ ID NO: 602 - protein, 49 aa, synthetic construct
  REGION 1..49: note = ATaRI peptide
DMKYHIFQVCGSWCRPLLRGMTLPQEPTLWAAVHWLSLFTLFPVPSVFC

SEQ ID NO: 603 - protein, 11 aa, synthetic construct
  REGION 1..11: note = ATaRI peptide
FNPFDLTKVSQ

SEQ ID NO: 604 - protein, 9 aa, synthetic construct
  REGION 1..9: note = ATaRI peptide
KEHIPGTLR

SEQ ID NO: 605 - protein, 12 aa, synthetic construct
  REGION 1..12: note = ATaRI peptide
GHQAGRRMGNSL

SEQ ID NO: 606 - protein, 16 aa, synthetic construct
  REGION 1..16: note = ATaRI peptide
YSEALLDQRCVLDGRD

SEQ ID NO: 607 - protein, 22 aa, synthetic construct
  REGION 1..22: note = ATaRI peptide
EIKPQMSEGMLSISFLYYLTSF

SEQ ID NO: 608 - protein, 9 aa, synthetic construct
  REGION 1..9: note = ATaRI peptide
QSLHDLQER

SEQ ID NO: 609 - protein, 36 aa, synthetic construct
  REGION 1..36: note = ATaRI peptide
LNMDFVDPVSKYGFYLGFLLSCVSFHLSLIPGPSFT

SEQ ID NO: 610 - protein, 15 aa, synthetic construct
  REGION 1..15: note = ATaRI peptide
VEYTSKDEVGRKNSS

SEQ ID NO: 611 - protein, 90 aa, synthetic construct
  REGION 1..90: note = ATaRI peptide
EGSPVSKGVSIWMELFLPVSTCSGLNGDPTKGYVHILIPGTCEFNFIWFKKRYFADVIKNLEIRRFTWIIQVSPKSNDSCPARGTEGEAT

SEQ ID NO: 612 - protein, 9 aa, synthetic construct
  REGION 1..9: note = ATaRI peptide
KVLKEKIAK

SEQ ID NO: 613 - protein, 9 aa, synthetic construct
  REGION 1..9: note = ATaRI peptide
IACNGSIQV

SEQ ID NO: 614 - protein, 18 aa, synthetic construct
  REGION 1..18: note = ATaRI peptide
RQAVPLFSVSSLFLHTRY

SEQ ID NO: 615 - protein, 30 aa, synthetic construct
  REGION 1..30: note = ATaRI peptide
EGLDIQLEVSKNFSFSTDKAFLYFNKNVNH

SEQ ID NO: 616 - protein, 21 aa, synthetic construct
  REGION 1..21: note = ATaRI peptide
RKLFDKLLVRTFSFPYGIVSI

SEQ ID NO: 617 - protein, 44 aa, synthetic construct
  REGION 1..44: note = ATaRI peptide
YTLGNIYAVSTTLCFMSHASCHFLFFFFFSPLSRMLLFSIPFLV

SEQ ID NO: 618 - protein, 9 aa, synthetic construct
  REGION 1..9: note = ATaRI peptide
EQKLEAQHR

SEQ ID NO: 619 - protein, 10 aa, synthetic construct
  REGION 1..10: note = ATaRI peptide
QMAKEAQLGK

SEQ ID NO: 620 - protein, 12 aa, synthetic construct
  REGION 1..12: note = ATaRI peptide
MPDDHARKVRLT

SEQ ID NO: 621 - protein, 16 aa, synthetic construct
  REGION 1..16: note = ATaRI peptide
FVFKEPQQVNSWFFLQ

SEQ ID NO: 622 - protein, 9 aa, synthetic construct
  REGION 1..9: note = ATaRI peptide
RAPEPRVIE

SEQ ID NO: 623 - protein, 31 aa, synthetic construct
  REGION 1..31: note = ATaRI peptide
YDEDKNPSVSEAPLPLGPKRELQGGVPYLDQ

SEQ ID NO: 624 - protein, 77 aa, synthetic construct
  REGION 1..77: note = ATaRI peptide
FDYPQVLQVSVIHYLSQRLRRVCLHGLKLSPANLSCFQHATRITQGEENIALLFTGHVDLQVLGCLVSCVRAKLLGL

SEQ ID NO: 625 - protein, 44 aa, synthetic construct
  REGION 1..44: note = ATaRI peptide
AWDYVQAQVRWGGAAGGSLAWVSLHLGLCAPTCLGLASAVLVCA

SEQ ID NO: 626 - protein, 79 aa, synthetic construct
  REGION 1..79: note = ATaRI peptide
TTAPTPSSGEGSGRPRGGEGALDLGVPAPLAWGSPAAPSRRLGVQDCGRGFEGVAAPPPGSRGAAGPSSRRRVGRRAAL

SEQ ID NO: 627 - protein, 95 aa, synthetic construct
  REGION 1..95: note = ATaRI peptide
SAGFFSWLVSVPWAIHGRGCQETWKETTRGSHTGPAWPQNFSTIASGPVDDGSCCPLAPAEWLQRLVSKGNAESTHLAVVSRSGNHQAELRAISP

SEQ ID NO: 628 - protein, 9 aa, synthetic construct
  REGION 1..9: note = ATaRI peptide
DETKANWMR

SEQ ID NO: 629 - protein, 103 aa, synthetic construct
  REGION 1..103: note = ATaRI peptide
GTDSPSTSCEYHQSPPPPSRLPAPQLTVHSLPPTFPLVLSCPSLSSPLFPSSPPSPTLLLSIPFCIHSRIFTEHLRARAVLGAGKTAVCKPHAGPALGETLDS

SEQ ID NO: 630 - protein, 9 aa, synthetic construct
  REGION 1..9: note = ATaRI peptide
PAHLRYHHR

SEQ ID NO: 631 - protein, 9 aa, synthetic construct
  REGION 1..9: note = ATaRI peptide
SHTLYDLDR

SEQ ID NO: 632 - protein, 21 aa, synthetic construct
  REGION 1..21: note = ATaRI peptide
AQSMAEDLVWKRLPLPQCILI

SEQ ID NO: 633 - protein, 31 aa, synthetic construct
  REGION 1..31: note = ATaRI peptide
ASWPSVQQVRHFLPQVLKGLHVHFYYCMLPN

SEQ ID NO: 634 - protein, 13 aa, synthetic construct
  REGION 1..13: note = ATaRI peptide
NPSTLGGQGGWIT

SEQ ID NO: 635 - protein, 9 aa, synthetic construct
  REGION 1..9: note = ATaRI peptide
SDSEPTDDR

SEQ ID NO: 636 - protein, 39 aa, synthetic construct
  REGION 1..39: note = ATaRI peptide
FGGIMSFASKCLQLSLSLLCSIFSTAEPDYGKCCLELHM

SEQ ID NO: 637 - protein, 56 aa, synthetic construct
  REGION 1..56: note = ATaRI peptide
KQKALEKQSKEQMPFPVPKSSIPANSPGPVGAGSLCQPHPKFALRACLEWQQVGSM

SEQ ID NO: 638 - protein, 19 aa, synthetic construct
  REGION 1..19: note = ATaRI peptide
VSLTSSSQVCDNLVEICKY

SEQ ID NO: 639 - protein, 53 aa, synthetic construct
  REGION 1..53: note = ATaRI peptide
QDSEVSTVVGEHHTGILVGGVWISPLEKGATFSLEAALSLRSAWFSWWRCLPS

SEQ ID NO: 640 - protein, 46 aa, synthetic construct
  REGION 1..46: note = ATaRI peptide
VLDQLANLVSTSGHPLGFPMGHFLVCVTCSPVHPVFENGAVVFDCK

SEQ ID NO: 641 - protein, 24 aa, synthetic construct
  REGION 1..24: note = ATaRI peptide
SKEEGTSQVGPTLKGLDISASVLW

SEQ ID NO: 642 - protein, 25 aa, synthetic construct
  REGION 1..25: note = ATaRI peptide
PLGTEGGLGELQRVPSVSLTGSYFQ

SEQ ID NO: 643 - protein, 34 aa, synthetic construct
  REGION 1..34: note = ATaRI peptide
PGFLQVHTREFMPGSHHPFLLSCSVPGPDTGCMM

SEQ ID NO: 644 - protein, 65 aa, synthetic construct
  REGION 1..65: note = ATaRI peptide
SRTVCNRTGKQIGFSVKPSCFLKEISIINKHNVSKYCFSFNYLRKNFKNFHNTNAYLLYEIQTSK

SEQ ID NO: 645 - protein, 16 aa, synthetic construct
  REGION 1..16: note = ATaRI peptide
PNSTAQYTRKSLRMPF

SEQ ID NO: 646 - protein, 40 aa, synthetic construct
  REGION 1..40: note = ATaRI peptide
PGRKSFCTGECSPNCLLDSSLSGADLAGQSSQVCSLSGFV

SEQ ID NO: 647 - protein, 36 aa, synthetic construct
  REGION 1..36: note = ATaRI peptide
AVILTTGEGKERPPWVKQPMSDAVTRAFSVPTEACE

SEQ ID NO: 648 - protein, 53 aa, synthetic construct
  REGION 1..53: note = ATaRI peptide
AVSLPQDPGREKTTVLALVQWHFAPRVHRRPAVYMPPSDLQEGWCAQLSPPRG

SEQ ID NO: 649 - protein, 79 aa, synthetic construct
  REGION 1..79: note = ATaRI peptide
NRYNNVLPCKLFYLQHLLCVPSVAITSLSVEGRESVILSNHFHNHSLVTYFHNHPLFTYYVLSTIFRCILLNPHNSLMK

SEQ ID NO: 650 - protein, 19 aa, synthetic construct
  REGION 1..19: note = ATaRI peptide
IRDFTVKNVSKKSGSVELM

SEQ ID NO: 651 - protein, 59 aa, synthetic construct
  REGION 1..59: note = ATaRI peptide
RPLMVQTEVRPRSVFDIPPFPSIFFFFFFFFETESCSVAQAGVQWHDLGSLQPLPPGFK

SEQ ID NO: 652 - protein, 19 aa, synthetic construct
  REGION 1..19: note = ATaRI peptide
SVCDNCVEVSTLGGVRLHA

SEQ ID NO: 653 - protein, 17 aa, synthetic construct
  REGION 1..17: note = ATaRI peptide
RGRTTNEQVWRKVTRDP

SEQ ID NO: 654 - protein, 44 aa, synthetic construct
  REGION 1..44: note = ATaRI peptide
HLGLATNEGKGCLDLQDTRTRGRIEKVAYELWKTGKGWEILLVL

SEQ ID NO: 655 - protein, 15 aa, synthetic construct
  REGION 1..15: note = ATaRI peptide
PADPAGDFGELPSAG

SEQ ID NO: 656 - protein, 40 aa, synthetic construct
  REGION 1..40: note = ATaRI peptide
FGGKILRKVSVDAAVEAPAVLLSRPCGTEHAFQSGLALLK

SEQ ID NO: 657 - protein, 55 aa, synthetic construct
  REGION 1..55: note = ATaRI peptide
TTKKQAKKGTSLLSRGVLRVKDLAVSPESASTSKGHSHGFTLCASISASVSGPNQ

SEQ ID NO: 658 - protein, 14 aa, synthetic construct
  REGION 1..14: note = ATaRI peptide
YSIPPGIQVSLSLR

SEQ ID NO: 659 - protein, 15 aa, synthetic construct
  REGION 1..15: note = ATaRI peptide
PDSEKGRKVRPEVST

SEQ ID NO: 660 - protein, 63 aa, synthetic construct
  REGION 1..63: note = ATaRI peptide
ISTARRVQVGGPALTPVVEPQLPRVISAVWVGGRGVVGTVGSARPRWLMLFGLLRGADECTPG

SEQ ID NO: 661 - protein, 35 aa, synthetic construct
  REGION 1..35: note = ATaRI peptide
LSAPIPEPSECLLRTESSNNHPFLGAEPALFSCPS

SEQ ID NO: 662 - protein, 38 aa, synthetic construct
  REGION 1..38: note = ATaRI peptide
IAMLVENQVSGSESQRGEGGEESSGSTENREKGNTGSQ

SEQ ID NO: 663 - protein, 46 aa, synthetic construct
  REGION 1..46: note = ATaRI peptide
PARRKRKTSKPEGMDSPASHRLGPTPEVHSLLPSRLWAFPFLLSAS

SEQ ID NO: 664 - protein, 60 aa, synthetic construct
  REGION 1..60: note = ATaRI peptide
RPVSVGLSRCVRAEASGEVGAAVGHRMGVLGWGRDSLALCGPGWRQHLPSAVMLISRPLA

SEQ ID NO: 665 - protein, 10 aa, synthetic construct
  REGION 1..10: note = ATaRI peptide
APAEDRAPRE

SEQ ID NO: 666 - protein, 85 aa, synthetic construct
  REGION 1..85: note = ATaRI peptide
ILRKAVQKVGCVRACVWGSGSRAVRRCCLVSMDFGVAMSAGPRSASQVRGQGAVLPHPVGLGSSLFACGCPWQMLRKEGASVHPG

SEQ ID NO: 667 - protein, 42 aa, synthetic construct
  REGION 1..42: note = ATaRI peptide
QYVLYVRLGKGHPPWGAAPDNSHLSIHSASIYCAHVASQALF

SEQ ID NO: 668 - protein, 47 aa, synthetic construct
  REGION 1..47: note = ATaRI peptide
RNLRTYNLRSVSGLGGQSQGGLCCLVSRGLHSSEGYPRPPRLHANLV

SEQ ID NO: 669 - protein, 24 aa, synthetic construct
  REGION 1..24: note = ATaRI peptide
TRTKDSQSVSTGRSLPSGSHPVVR

SEQ ID NO: 670 - protein, 29 aa, synthetic construct
  REGION 1..29: note = ATaRI peptide
KYLDLKNSVSQTSTLTPPRPHPSHSATMT

SEQ ID NO: 671 - protein, 9 aa, synthetic construct
  REGION 1..9: note = ATaRI peptide
LCQLARSCS

SEQ ID NO: 672 - protein, 18 aa, synthetic construct
  REGION 1..18: note = ATaRI peptide
AVVTQVNKVRPYIGEAVG

SEQ ID NO: 673 - protein, 43 aa, synthetic construct
  REGION 1..43: note = ATaRI peptide
HFGKVCQDVSASLKTGSDFFLTGSLCPAFWCVFFRSWTTTGQH

SEQ ID NO: 674 - protein, 16 aa, synthetic construct
  REGION 1..16: note = ATaRI peptide
LLGYKSSEVCAPRPIL

SEQ ID NO: 675 - protein, 31 aa, synthetic construct
  REGION 1..31: note = ATaRI peptide
FSSSPSQNRYAGSCPKAPKGNLFVLNLPGFP

SEQ ID NO: 676 - protein, 9 aa, synthetic construct
  REGION 1..9: note = ATaRI peptide
KFTSKFVRR

SEQ ID NO: 677 - protein, 246 aa, synthetic construct
  REGION 1..246: note = ATaRI peptide
LFPTHPTKVSALPCPTPPSSSLRMSRWPGRPAGRGVGKGRRRPPFPLSSRKPSPGAYHADPGLGTLSLLTGPCVATAPPPTEIQSIAAPFLQKDCSPETLACGSKNALTPATPRTAREPWLWGSSLVPGRVLSVLSEVRAQPLPLLPQSRGSFSPAQIWECGEGQAPCAGLPAGKEWLSRQCEVLQSPVGLPGDGQRALGLGPAHPLVAPPQTHSHLGLWRRKEREIPALNSPSLCFLRNLNEPES

SEQ ID NO: 678 - protein, 22 aa, synthetic construct
  REGION 1..22: note = ATaRI peptide
SSHNTYLTGEWGARVAPVTSAL

SEQ ID NO: 679 - protein, 17 aa, synthetic construct
  REGION 1..17: note = ATaRI peptide
TEPSSPQLGRPQPGPPP

SEQ ID NO: 680 - protein, 9 aa, synthetic construct
  REGION 1..9: note = ATaRI peptide
GAGLLHISR

SEQ ID NO: 681 - protein, 12 aa, synthetic construct
  REGION 1..12: note = ATaRI peptide
LCTSILRLVRGS

SEQ ID NO: 682 - protein, 37 aa, synthetic construct
  REGION 1..37: note = ATaRI peptide
SVIDPSTEVRVGTQGSVSCMTPSKPWESHTFTGVFYK

SEQ ID NO: 683 - protein, 45 aa, synthetic construct
  REGION 1..45: note = ATaRI peptide
PSMSEPPEGKLPRSFTQNNYFISYLENTEFYVLYVITYIFFQIRE

SEQ ID NO: 684 - protein, 37 aa, synthetic construct
  REGION 1..37: note = ATaRI peptide
EFADRINQVGPSVQGRGRWSKARTCNKASQGWWVFGM

SEQ ID NO: 685 - protein, 9 aa, synthetic construct
  REGION 1..9: note = ATaRI peptide
GRPAACDLR

SEQ ID NO: 686 - protein, 14 aa, synthetic construct
  REGION 1..14: note = ATaRI peptide
DSGTFILSGETQTL

SEQ ID NO: 687 - protein, 66 aa, synthetic construct
  REGION 1..66: note = ATaRI peptide
NLFLEEIQVSPQPTLGFDPIFFILPLPCFSGYLTIDPQETSMDCGVRPIRVQTQAPAHTYSVTSLG

SEQ ID NO: 688 - protein, 45 aa, synthetic construct
  REGION 1..45: note = ATaRI peptide
GAMGAAAAVSVKVLLSSPAAARGPGKMGRERASPQGAPRTELARG

SEQ ID NO: 689 - protein, 13 aa, synthetic construct
  REGION 1..13: note = ATaRI peptide
QEEGAVGGGECLL

SEQ ID NO: 690 - protein, 30 aa, synthetic construct
  REGION 1..30: note = ATaRI peptide
VHYFYDESGEPFPSPVAQCLPAFPQQPESS

SEQ ID NO: 691 - protein, 46 aa, synthetic construct
  REGION 1..46: note = ATaRI peptide
RVPLEIPEVRSSRGRAVPVGRDGAGRSLSPACIESLPRCPRRDGQC

SEQ ID NO: 692 - protein, 9 aa, synthetic construct
  REGION 1..9: note = ATaRI peptide
LALLALLDR

SEQ ID NO: 693 - protein, 92 aa, synthetic construct
  REGION 1..92: note = ATaRI peptide
QLRDSGEKVRLGMGRVTASAVTCPHEHLCHRRQPHSCLKPLFHLFFVFWVCFFFFFLRQSFALSPRLECSGAASAHCNLRLPGSSDSYSSAS

SEQ ID NO: 694 - protein, 22 aa, synthetic construct
  REGION 1..22: note = ATaRI peptide
IHGDLYYEVREGAGRGQAGPWG

SEQ ID NO: 695 - protein, 22 aa, synthetic construct
  REGION 1..22: note = ATaRI peptide
GLNSPIPEVSIVLSFILGHFCF

SEQ ID NO: 696 - protein, 32 aa, synthetic construct
  REGION 1..32: note = ATaRI peptide
VTKEKNKKGKYPQGRGRPWATRPPVSSLRAWE

SEQ ID NO: 697 - protein, 9 aa, synthetic construct
  REGION 1..9: note = ATaRI peptide
VTGPRAHSW

SEQ ID NO: 698 - protein, 18 aa, synthetic construct
  REGION 1..18: note = ATaRI peptide
GGPQDSDRVSVCLGLGLG

SEQ ID NO: 699 - protein, 21 aa, synthetic construct
  REGION 1..21: note = ATaRI peptide
GDGRGRVRGDAGKGEKAEDTF

SEQ ID NO: 700 - protein, 9 aa, synthetic construct
  REGION 1..9: note = ATaRI peptide
KNSDGLGIK

SEQ ID NO: 701 - protein, 23 aa, synthetic construct
  REGION 1..23: note = ATaRI peptide
GYTFVIPSGKQNGKSGLFSHFFP

SEQ ID NO: 702 - protein, 16 aa, synthetic construct
  REGION 1..16: note = ATaRI peptide
IVHPGCLQVRRAMRGS

SEQ ID NO: 703 - protein, 23 aa, synthetic construct
  REGION 1..23: note = ATaRI peptide
SETSDMPEVRLGLGELSLQGWGP

SEQ ID NO: 704 - protein, 11 aa, synthetic construct
  REGION 1..11: note = ATaRI peptide
YLEPLEDGVRG

SEQ ID NO: 705 - protein, 38 aa, synthetic construct
  REGION 1..38: note = ATaRI peptide
IVMTVPRKVRPPVPRLTWPFLQQAGHAVVTRARPVNGT

SEQ ID NO: 706 - protein, 39 aa, synthetic construct
  REGION 1..39: note = ATaRI peptide
RFDYIFFTGEAGTRVGTGWGRGGQLLRGPVPNSGSPQGD

SEQ ID NO: 707 - protein, 58 aa, synthetic construct
  REGION 1..58: note = ATaRI peptide
YAFSNSSQVGVRPGWAGSGARSGQHKWWQQGGHQNPVASGLWDGGPLGSVSAHSPGSS

SEQ ID NO: 708 - protein, 30 aa, synthetic construct
  REGION 1..30: note = ATaRI peptide
CEELEKTFSELVPGLHSRQASWRRHGPSLI

SEQ ID NO: 709 - protein, 46 aa, synthetic construct
  REGION 1..46: note = ATaRI peptide
GRYQEVNPGESHGILTRVLGGSAAPLGGCEPEGEVSPSWAWPALLG

SEQ ID NO: 710 - protein, 9 aa, synthetic construct
  REGION 1..9: note = ATaRI peptide
AIVVNAERG

SEQ ID NO: 711 - protein, 23 aa, synthetic construct
  REGION 1..23: note = ATaRI peptide
GSQHGPFTGKEPEIWNDLEEAGE

SEQ ID NO: 712 - protein, 33 aa, synthetic construct
  REGION 1..33: note = ATaRI peptide
GDNLLLKHVSLFGLVFLPLSPGYSSFPLDCDVN

SEQ ID NO: 713 - protein, 26 aa, synthetic construct
  REGION 1..26: note = ATaRI peptide
FTLNTNESVSINSVVSSVAHERLKIG

SEQ ID NO: 714 - protein, 83 aa, synthetic construct
  REGION 1..83: note = ATaRI peptide
AALAVQPEGACREAWVHARVTWLLCQTRPDSQAQGLVEPGSEMVGLMSTGQLMKEIVPVLLEPQHADSGKSKGSKLPGMQCAD

SEQ ID NO: 715 - protein, 33 aa, synthetic construct
  REGION 1..33: note = ATaRI peptide
FAADLSVKVRRAPGPLRAAPASQRLAAALLVYC

SEQ ID NO: 716 - protein, 132 aa, synthetic construct
  REGION 1..132: note = ATaRI peptide
RWSLPEMARWALGALGSQGWEGALSAPGHVVAGGAHRSLILDCVLRIPGWLVTVWGGCWGAFGVSLVPAVPQKPPSSLRARARAANTAAPARRLLSPMGTLSDGSPLVPSVAVPCLSPLPSPPTHGVGTLPA

SEQ ID NO: 717 - protein, 9 aa, synthetic construct
  REGION 1..9: note = ATaRI peptide
GEGGAFPQA

SEQ ID NO: 718 - protein, 99 aa, synthetic construct
  REGION 1..99: note = ATaRI peptide
LVTMVTSKVGAGPGSVRHRADTVSQELLHPQCPSQGWAHTQWMFQASNYGLDSTSVPCCPPGLRRHSPSHPRSHPMKQPCHPLCHDQEPERAPCSLASW

SEQ ID NO: 719 - protein, 16 aa, synthetic construct
  REGION 1..16: note = ATaRI peptide
LSSWASPARYGPLLRR

SEQ ID NO: 720 - protein, 26 aa, synthetic construct
  REGION 1..26: note = ATaRI peptide
QRHPRSYNVSHFASYFFVCQSSRDPS

SEQ ID NO: 721 - protein, 53 aa, synthetic construct
  REGION 1..53: note = ATaRI peptide
DLKRMFSNPYPLLGSLLGVGCGKKVLASVTCIWVLLGPSLLPPTRTCQTMVGS

SEQ ID NO: 722 - protein, 73 aa, synthetic construct
  REGION 1..73: note = ATaRI peptide
WPEVEVPLSKKHSGGGWAMGTEVPRVGLTPERQSPSAHVPPAEPAGLSTHHSPSPTQCHGCRLGAAPKMLPIK

SEQ ID NO: 723 - protein, 50 aa, synthetic construct
  REGION 1..50: note = ATaRI peptide
IINITMTKVRLLGQGLQGSNSHFLSRASLHWALSQEQGGMSSQSMLQWES

SEQ ID NO: 724 - protein, 79 aa, synthetic construct
  REGION 1..79: note = ATaRI peptide
STISSSFGSELWPSPPTWPWQAGWTAQRRGRGGTSVGQRHGVRPQDVSTQSNEGRGCDTKDPEDSGTVRRDHEDPGALS

SEQ ID NO: 725 - protein, 9 aa, synthetic construct
  REGION 1..9: note = ATaRI peptide
HAASVTCIL

SEQ ID NO: 726 - protein, 97 aa, synthetic construct
  REGION 1..97: note = ATaRI peptide
PAPVLLPYGELGMGPGKEKSRTLSPAALQQEGADTPGEPPAGQGSVTQLVKNLRQLDPRKHLWAHPGLSGRWRMKGLLAFMGKAGMAEGKMPIGTQA

SEQ ID NO: 727 - protein, 20 aa, synthetic construct
  REGION 1..20: note = ATaRI peptide
GEKPIYSVGKQFLPDVVGLL

SEQ ID NO: 728 - protein, 9 aa, synthetic construct
  REGION 1..9: note = ATaRI peptide
RASTDSTLW

SEQ ID NO: 729 - protein, 18 aa, synthetic construct
  REGION 1..18: note = ATaRI peptide
LGLQSRQLASGSYMTFEL

SEQ ID NO: 730 - protein, 11 aa, synthetic construct
  REGION 1..11: note = ATaRI peptide
ADCDPVYKVQA

SEQ ID NO: 731 - protein, 17 aa, synthetic construct
  REGION 1..17: note = ATaRI peptide
VENETGKDISFAKWLIL

SEQ ID NO: 732 - protein, 45 aa, synthetic construct
  REGION 1..45: note = ATaRI peptide
VVREDKLEGKCFSDLASFSSYGISVGAIKNLPLTSAYNIFSYLTE

SEQ ID NO: 733 - protein, 12 aa, synthetic construct
  REGION 1..12: note = ATaRI peptide
TEAKEVTNVSLL

SEQ ID NO: 734 - protein, 34 aa, synthetic construct
  REGION 1..34: note = ATaRI peptide
ESDSSEDEGGHYHSFWVRGINFTFNVQGAKKVMD

SEQ ID NO: 735 - protein, 31 aa, synthetic construct
  REGION 1..31: note = ATaRI peptide
EPEPPSVKVKLYWDSCMSMHPLCLKDLQPLC

SEQ ID NO: 736 - protein, 10 aa, synthetic construct
  REGION 1..10: note = ATaRI peptide
DPAFIEPKGM

SEQ ID NO: 737 - protein, 52 aa, synthetic construct
  REGION 1..52: note = ATaRI peptide
NPLVAHTRGIVPANLPPLNPVPKEQCGTLIPTSSMPSPGIYSVSGWTRFMVH

SEQ ID NO: 738 - protein, 9 aa, synthetic construct
  REGION 1..9: note = ATaRI peptide
DGGAGVQCR

SEQ ID NO: 739 - protein, 13 aa, synthetic construct
  REGION 1..13: note = ATaRI peptide
SMSHCAWPLSVSF

SEQ ID NO: 740 - protein, 27 aa, synthetic construct
  REGION 1..27: note = ATaRI peptide
TGSSLLRLSECPALVLVASEQCPWHFQ

SEQ ID NO: 741 - protein, 57 aa, synthetic construct
  REGION 1..57: note = ATaRI peptide
LTTTAKVRVSCRAFLGGPWAASWPSRSTAPGAMPTARAACAAWTKRIFQLLLWACGL

SEQ ID NO: 742 - protein, 13 aa, synthetic construct
  REGION 1..13: note = ATaRI peptide
YGQQGKTQVCYKI

SEQ ID NO: 743 - protein, 61 aa, synthetic construct
  REGION 1..61: note = ATaRI peptide
EPVMEAIKVSDSPLLGPCPTLTKVPVWAFQRAIPQLGGSPRHLVPGCLPSPPQVHHVPQAH

SEQ ID NO: 744 - protein, 17 aa, synthetic construct
  REGION 1..17: note = ATaRI peptide
SSPSPHRKVPGVELGGQ

SEQ ID NO: 745 - protein, 34 aa, synthetic construct
  REGION 1..34: note = ATaRI peptide
SEENYVPMVSPSGFAGMTPFKSPGTHPSVPHFPA

SEQ ID NO: 746 - protein, 22 aa, synthetic construct
  REGION 1..22: note = ATaRI peptide
RNLKPDRKGKSILSPVPSLDSG

SEQ ID NO: 747 - protein, 22 aa, synthetic construct
  REGION 1..22: note = ATaRI peptide
LEQAKAQLVSKGDCHFKYFKPV

SEQ ID NO: 748 - protein, 31 aa, synthetic construct
  REGION 1..31: note = ATaRI peptide
SSRETANPCESDCHWPSSLSYSFSHLSPQQP

SEQ ID NO: 749 - protein, 11 aa, synthetic construct
  REGION 1..11: note = ATaRI peptide
NGSTPMHKGEL

SEQ ID NO: 750 - protein, 37 aa, synthetic construct
  REGION 1..37: note = ATaRI peptide
ERPSDVAKRYKSLSSLLLSFLFKVLRILFWTQKSLKF

SEQ ID NO: 751 - protein, 9 aa, synthetic construct
  REGION 1..9: note = ATaRI peptide
LLQAEYTEG

SEQ ID NO: 752 - protein, 18 aa, synthetic construct
  REGION 1..18: note = ATaRI peptide
VGTEEAPKVGGNPKWYGG

SEQ ID NO: 753 - protein, 84 aa, synthetic construct
  REGION 1..84: note = ATaRI peptide
SRPLWRRECKCSFWQLRDCGVKVLNSFKTGGAGTSGLLWGEGEVSLRKTRACGRKLKLPTGILMWGREQAGTRQRRVVLVIAWV

SEQ ID NO: 754 - protein, 17 aa, synthetic construct
  REGION 1..17: note = ATaRI peptide
FKCVNSLKVCAKKDPLG

SEQ ID NO: 755 - protein, 13 aa, synthetic construct
  REGION 1..13: note = ATaRI peptide
PITMQCIKVGFSG

SEQ ID NO: 756 - protein, 10 aa, synthetic construct
  REGION 1..10: note = ATaRI peptide
LGDLILSKVW

SEQ ID NO: 757 - protein, 9 aa, synthetic construct
  REGION 1..9: note = ATaRI peptide
LVRKFVDSM

SEQ ID NO: 758 - protein, 21 aa, synthetic construct
  REGION 1..21: note = ATaRI peptide
DYTSSQCGVSWCEPKLCPITC

SEQ ID NO: 759 - protein, 24 aa, synthetic construct
  REGION 1..24: note = ATaRI peptide
CLDIGNGQVSVLNCPAPCLQSTKI

SEQ ID NO: 760 - protein, 9 aa, synthetic construct
  REGION 1..9: note = ATaRI peptide
EILLKQKTW

SEQ ID NO: 761 - protein, 16 aa, synthetic construct
  REGION 1..16: note = ATaRI peptide
PPPPTLFEVSLSIKRN

SEQ ID NO: 762 - protein, 27 aa, synthetic construct
  REGION 1..27: note = ATaRI peptide
NRETDTKRVIDLLFLHALALLFLCALN

SEQ ID NO: 763 - protein, 15 aa, synthetic construct
  REGION 1..15: note = ATaRI peptide
MKKIHLAQVRLIFYP

SEQ ID NO: 764 - protein, 10 aa, synthetic construct
  REGION 1..10: note = ATaRI peptide
RMSARQKQVI

SEQ ID NO: 765 - protein, 14 aa, synthetic construct
  REGION 1..14: note = ATaRI peptide
KDFFKDSQVCFKPE

SEQ ID NO: 766 - protein, 10 aa, synthetic construct
  REGION 1..10: note = ATaRI peptide
AIGRTSILGK

SEQ ID NO: 767 - protein, 76 aa, synthetic construct
  REGION 1..76: note = ATaRI peptide
IIHSPELIRYVFLKFTHFCRCVTFRVFCFLVFFFFFFFFEMDFPSVARLECSGTILAHCSLRLPGSSNSPASQLHE

SEQ ID NO: 768 - protein, 9 aa, synthetic construct
  REGION 1..9: note = ATaRI peptide
GVTENLGQR

SEQ ID NO: 769 - protein, 68 aa, synthetic construct
  REGION 1..68: note = ATaRI peptide
QDGFDYFTGESKQHGNTEGFPCFDLFVAYHLNIHFFFFFLSRNFALVAQAGVQWCDLSSSQPMPPGFK

SEQ ID NO: 770 - protein, 22 aa, synthetic construct
  REGION 1..22: note = ATaRI peptide
MIYSMCKKVGHFYISDFMRLLL

SEQ ID NO: 771 - protein, 42 aa, synthetic construct
  REGION 1..42: note = ATaRI peptide
QIFKAIFQSKSTCYMWIHFIEQICCSFCLPFKGRVWRISNPD

SEQ ID NO: 772 - protein, 15 aa, synthetic construct
  REGION 1..15: note = ATaRI peptide
AFIHHTSKGKITLKV

SEQ ID NO: 773 - protein, 14 aa, synthetic construct
  REGION 1..14: note = ATaRI peptide
NEQEKKMQVCKATF

SEQ ID NO: 774 - protein, 32 aa, synthetic construct
  REGION 1..32: note = ATaRI peptide
RVIKLEEEVRPGCGDLVGKRASRAQRASTFFS

SEQ ID NO: 775 - protein, 9 aa, synthetic construct
  REGION 1..9: note = ATaRI peptide
RRCQDMEYT

SEQ ID NO: 776 - protein, 66 aa, synthetic construct
  REGION 1..66: note = ATaRI peptide
YTTAHHLKVYIKEMFYLVMRIPRILNTKIIFLCNSNATVFSQLSRYWHLVTLIHRHVKTYADFRDC

SEQ ID NO: 777 - protein, 24 aa, synthetic construct
  REGION 1..24: note = ATaRI peptide
QKHIRTHTGTSGNRVSKSFFFFFF

SEQ ID NO: 778 - protein, 12 aa, synthetic construct
  REGION 1..12: note = ATaRI peptide
KNHVRIHTGNNL

SEQ ID NO: 779 - protein, 30 aa, synthetic construct
  REGION 1..30: note = ATaRI peptide
EAFFEPPPGESFVYYILFLSLRINSYEHNL

SEQ ID NO: 780 - protein, 33 aa, synthetic construct
  REGION 1..33: note = ATaRI peptide
ISQDGTQHVSIHQKPNKLNLSVNLGLKGRLGPH

SEQ ID NO: 781 - protein, 27 aa, synthetic construct
  REGION 1..27: note = ATaRI peptide
STMLTRIDVGIFVLLLILKGIFQVFHH

SEQ ID NO: 782 - protein, 9 aa, synthetic construct
  REGION 1..9: note = ATaRI peptide
KFKNSLLQK

SEQ ID NO: 783 - protein, 42 aa, synthetic construct
  REGION 1..42: note = ATaRI peptide
NRYTEKQIVSIAAGGDGRGWRGPGRTEARCPCRAAASFSAHS

SEQ ID NO: 784 - protein, 9 aa, synthetic construct
  REGION 1..9: note = ATaRI peptide
RILRGQAER

SEQ ID NO: 785 - protein, 27 aa, synthetic construct
  REGION 1..27: note = ATaRI peptide
LDENCCVEVSLLLLLCMITPCCPLMLK

SEQ ID NO: 786 - protein, 35 aa, synthetic construct
  REGION 1..35: note = ATaRI peptide
TELEREKLVSITWLEKAAAVAQPGSVGTGKGWRLQ

SEQ ID NO: 787 - protein, 19 aa, synthetic construct
  REGION 1..19: note = ATaRI peptide
KQALEQYEVMRLGPANLYI

SEQ ID NO: 788 - protein, 115 aa, synthetic construct
  REGION 1..115: note = ATaRI peptide
ETVINALKASALSLGSAHSLSRCRGSSCEGWGYAVPPDSPQRWRWCWCCWPPPVTYSWEVTPLLRAMLPGDGRVGPAVLVRLSRGVSGSPFPAGGSPRVPSCACIVLTSRNGSSW

SEQ ID NO: 789 - protein, 22 aa, synthetic construct
  REGION 1..22: note = ATaRI peptide
FKQQEPIQVCYRYFCVFIYCYL

SEQ ID NO: 790 - protein, 18 aa, synthetic construct
  REGION 1..18: note = ATaRI peptide
FSFSENLFGKLSSSFEYQ

SEQ ID NO: 791 - protein, 43 aa, synthetic construct
  REGION 1..43: note = ATaRI peptide
MMSMKPAKGRTLFTGAFRSSSCNWTEEIWGLWLEMTVTDVCQR

SEQ ID NO: 792 - protein, 38 aa, synthetic construct
  REGION 1..38: note = ATaRI peptide
MLAECMYTGIHFKQLHFTKNLLRRQMSGNSSRECYFTY

SEQ ID NO: 793 - protein, 24 aa, synthetic construct
  REGION 1..24: note = ATaRI peptide
TSTTKSCRVIICNGVCQDWQELSF

SEQ ID NO: 794 - protein, 11 aa, synthetic construct
  REGION 1..11: note = ATaRI peptide
VEFTKKLPGIF

SEQ ID NO: 795 - protein, 15 aa, synthetic construct
  REGION 1..15: note = ATaRI peptide
TAIVILSPGNSNVTF

SEQ ID NO: 796 - protein, 29 aa, synthetic construct
  REGION 1..29: note = ATaRI peptide
LEIGRIVSRYVFHNISEFQCYKHFKSTEF

SEQ ID NO: 797 - protein, 30 aa, synthetic construct
  REGION 1..30: note = ATaRI peptide
GDKILFIRVSPLFTLYLHINTVLKLDLLLY

SEQ ID NO: 798 - protein, 45 aa, synthetic construct
  REGION 1..45: note = ATaRI peptide
DRTASYEEVRECDTSQSSSVHGVLVSSVSRSELFFKVFLFGHEML

SEQ ID NO: 799 - protein, 9 aa, synthetic construct
  REGION 1..9: note = ATaRI peptide
VKDMSSIYR

SEQ ID NO: 800 - protein, 18 aa, synthetic construct
  REGION 1..18: note = ATaRI peptide
FAMKQFEQVSKLLSSEYF

SEQ ID NO: 801 - protein, 26 aa, synthetic construct
  REGION 1..26: note = ATaRI peptide
VDKGSFGKGQLQSSCVLFSSFLAHSK

SEQ ID NO: 802 - protein, 9 aa, synthetic construct
  REGION 1..9: note = ATaRI peptide
VERVKNLVL

SEQ ID NO: 803 - protein, 10 aa, synthetic construct
  REGION 1..10: note = ATaRI peptide
VQLPESMEVF

SEQ ID NO: 804 - protein, 9 aa, synthetic construct
  REGION 1..9: note = ATaRI peptide
WDPVIELIR

SEQ ID NO: 805 - protein, 9 aa, synthetic construct
  REGION 1..9: note = ATaRI peptide
SPLFLRFIK

SEQ ID NO: 806 - protein, 20 aa, synthetic construct
  REGION 1..20: note = ATaRI peptide
HILDQREKVRFTIDAFKSSA

SEQ ID NO: 807 - protein, 26 aa, synthetic construct
  REGION 1..26: note = ATaRI peptide
FHGAVWPQVNLNFYICLCTFCFFLYY

SEQ ID NO: 808 - protein, 17 aa, synthetic construct
  REGION 1..17: note = ATaRI peptide
ISIWSRNARYNLSFFLL

SEQ ID NO: 809 - protein, 11 aa, synthetic construct
  REGION 1..11: note = ATaRI peptide
IFDEKMLKVGH

SEQ ID NO: 810 - protein, 15 aa, synthetic construct
  REGION 1..15: note = ATaRI peptide
MGKIENEESKFLKLS

SEQ ID NO: 811 - protein, 30 aa, synthetic construct
  REGION 1..30: note = ATaRI peptide
LHKCLASTVINLFGVQQVCVNSGVGGALSH

SEQ ID NO: 812 - protein, 32 aa, synthetic construct
  REGION 1..32: note = ATaRI peptide
SCLDIMIEVRLTETNSNFFLSGPTTQKNQFTK

SEQ ID NO: 813 - protein, 16 aa, synthetic construct
  REGION 1..16: note = ATaRI peptide
PARVQCRQVCREHLSP

SEQ ID NO: 814 - protein, 23 aa, synthetic construct
  REGION 1..23: note = ATaRI peptide
AETLSKIWSKYFLFYLNQTHLLS

SEQ ID NO: 815 - protein, 24 aa, synthetic construct
  REGION 1..24: note = ATaRI peptide
LNSTYSEQGNPASSVLLPFAHEDF

SEQ ID NO: 816 - protein, 11 aa, synthetic construct
  REGION 1..11: note = ATaRI peptide
GKNGSTIAVRQ

SEQ ID NO: 817 - protein, 41 aa, synthetic construct
  REGION 1..41: note = ATaRI peptide
YVVLWMAMVSIFLHFIYFLTMLKSYFSELSVASRSSLGQAW

SEQ ID NO: 818 - protein, 27 aa, synthetic construct
  REGION 1..27: note = ATaRI peptide
IFSFFAEQVSFIYFMWVLNGISWYTSI

SEQ ID NO: 819 - protein, 52 aa, synthetic construct
  REGION 1..52: note = ATaRI peptide
ESYYDPNLVSGMGYFYVQQKVHPYQVLLTAFLYSTSELAAGSMVLYVFVAKQ

SEQ ID NO: 820 - protein, 46 aa, synthetic construct
  REGION 1..46: note = ATaRI peptide
LTFIQDFQVGVYQFKCFKLRTIRISKNLQKTFCIFKKSTFFFFFFF

SEQ ID NO: 821 - protein, 9 aa, synthetic construct
  REGION 1..9: note = ATaRI peptide
VVVRNMGEW

SEQ ID NO: 822 - protein, 11 aa, synthetic construct
  REGION 1..11: note = ATaRI peptide
HKIPDTETVSP

SEQ ID NO: 823 - protein, 25 aa, synthetic construct
  REGION 1..25: note = ATaRI peptide
HTASVIGNKYGGFLYFASVFFKKTT

SEQ ID NO: 824 - protein, 10 aa, synthetic construct
  REGION 1..10: note = ATaRI peptide
KDLWYLDTGR

SEQ ID NO: 825 - protein, 17 aa, synthetic construct
  REGION 1..17: note = ATaRI peptide
KGKQSISKVAIDIFSTL

SEQ ID NO: 826 - protein, 17 aa, synthetic construct
  REGION 1..17: note = ATaRI peptide
PSAVRISKVRHRVKTCW

SEQ ID NO: 827 - protein, 17 aa, synthetic construct
  REGION 1..17: note = ATaRI peptide
ERNVQFGLVSLGAFFCY

SEQ ID NO: 828 - protein, 23 aa, synthetic construct
  REGION 1..23: note = ATaRI peptide
SGGLAAAKARLLVLSVVCCLGGD

SEQ ID NO: 829 - protein, 27 aa, synthetic construct
  REGION 1..27: note = ATaRI peptide
PTPLGTRWGKLLRYSRSDVAEVVFPWQ

SEQ ID NO: 830 - protein, 55 aa, synthetic construct
  REGION 1..55: note = ATaRI peptide
IRQFVPIKVSGFACRFLDSTFTVKGKKRVELVVEASFQHYKPSGMLIPLLLYTGI

SEQ ID NO: 831 - protein, 50 aa, synthetic construct
  REGION 1..50: note = ATaRI peptide
PHSKVIQMVTMLCFHMVKLLVCLSPKKKRTFPFYFQVFIFLVLAHVSNVV

SEQ ID NO: 832 - protein, 9 aa, synthetic construct
  REGION 1..9: note = ATaRI peptide
NLDPIALKV

SEQ ID NO: 833 - protein, 12 aa, synthetic construct
  REGION 1..12: note = ATaRI peptide
ETTGVHFQVKDI

SEQ ID NO: 834 - protein, 12 aa, synthetic construct
  REGION 1..12: note = ATaRI peptide
KDHWTMYKRYTN

SEQ ID NO: 835 - protein, 9 aa, synthetic construct
  REGION 1..9: note = ATaRI peptide
DLISELRER

SEQ ID NO: 836 - protein, 9 aa, synthetic construct
  REGION 1..9: note = ATaRI peptide
LPSQTLEQV

SEQ ID NO: 837 - protein, 36 aa, synthetic construct
  REGION 1..36: note = ATaRI peptide
YLYNLNNQVSRVYKFFFFNVGGDSWKAEGQGIDFYG

SEQ ID NO: 838 - protein, 21 aa, synthetic construct
  REGION 1..21: note = ATaRI peptide
FTDDGFAMGKLNGIVFPLILY

SEQ ID NO: 839 - protein, 60 aa, synthetic construct
  REGION 1..60: note = ATaRI peptide
KEINSSHPRFLCLFSLFILYVVLLHLTPGYLGILKKGFTNSVYHLSLLPPLSLILLLIFS

SEQ ID NO: 840 - protein, 17 aa, synthetic construct
  REGION 1..17: note = ATaRI peptide
KLFEEIREASCFVVCVS

SEQ ID NO: 841 - protein, 38 aa, synthetic construct
  REGION 1..38: note = ATaRI peptide
TGNIVEVLRLALLLFAFPRVSLSSFRREVGHQGTQNNN

SEQ ID NO: 842 - protein, 13 aa, synthetic construct
  REGION 1..13: note = ATaRI peptide
DNPIWSLIGESFY

SEQ ID NO: 843 - protein, 9 aa, synthetic construct
  REGION 1..9: note = ATaRI peptide
IRNALPIGR

SEQ ID NO: 844 - protein, 10 aa, synthetic construct
  REGION 1..10: note = ATaRI peptide
KRLELAGQVI

SEQ ID NO: 845 - protein, 15 aa, synthetic construct
  REGION 1..15: note = ATaRI peptide
GMVNAISTVSLQSLF

SEQ ID NO: 846 - protein, 18 aa, synthetic construct
  REGION 1..18: note = ATaRI peptide
NVFLVFLNGGYIIETCWS

SEQ ID NO: 847 - protein, 74 aa, synthetic construct
  REGION 1..74: note = ATaRI peptide
DADGICSPGKSLLKEKILILFDIICYSIIFLNIWQKGQKKVTTYKTTIQTQPMRSFLMNFLPVCFSIHYVFTYQ

SEQ ID NO: 848 - protein, 16 aa, synthetic construct
  REGION 1..16: note = ATaRI peptide
PQYKDVPITYVLVVPW

SEQ ID NO: 849 - protein, 36 aa, synthetic construct
  REGION 1..36: note = ATaRI peptide
FMEKRIDKVRLIKWKPWEDASKECKCAIHTDTHHRA

SEQ ID NO: 850 - protein, 92 aa, synthetic construct
  REGION 1..92: note = ATaRI peptide
LFVLCKERGRLNSLCLCLLSFRGTLRNLIDSVSTGRLIPFFPKLTVCSIREAEELIKINSQKHLYTLLNSLRHAKTDTLPNTLTFKLCLLYP

SEQ ID NO: 851 - protein, 10 aa, synthetic construct
  REGION 1..10: note = ATaRI peptide
DQCNLEVHGK

SEQ ID NO: 852 - protein, 10 aa, synthetic construct
  REGION 1..10: note = ATaRI peptide
SLAVHTDKVW

SEQ ID NO: 853 - protein, 50 aa, synthetic construct
  REGION 1..50: note = ATaRI peptide
VHSRDMKMVRISLGICFLFILFLTLSFSGTCVACFSVGTIALTNMDVLGK

SEQ ID NO: 854 - protein, 12 aa, synthetic construct
  REGION 1..12: note = ATaRI peptide
WDISTVSSGKDF

SEQ ID NO: 855 - protein, 27 aa, synthetic construct
  REGION 1..27: note = ATaRI peptide
TERKKRRKGKNENTASWSVDLTQIPVI

SEQ ID NO: 856 - protein, 16 aa, synthetic construct
  REGION 1..16: note = ATaRI peptide
QISSFEEQVSTTFEQV

SEQ ID NO: 857 - protein, 18 aa, synthetic construct
  REGION 1..18: note = ATaRI peptide
KQITCRTRGSCFPLKYNT

SEQ ID NO: 858 - protein, 31 aa, synthetic construct
  REGION 1..31: note = ATaRI peptide
VCKHCEHQVNTIPTLDISGRGFPKVRILERT

SEQ ID NO: 859 - protein, 57 aa, synthetic construct
  REGION 1..57: note = ATaRI peptide
QRPVPPPPRYSCFTGDCSPDMIPFRCVLSLLQVGLSGALFTSLGGGFLGLSTIDIWG

SEQ ID NO: 860 - protein, 29 aa, synthetic construct
  REGION 1..29: note = ATaRI peptide
CKNGVAFLGRVCPHQIHGNWGIAGTLCWV

SEQ ID NO: 861 - protein, 32 aa, synthetic construct
  REGION 1..32: note = ATaRI peptide
DFPILFRQVSSSCCVFSHLSLGIVCGLPDYFS

SEQ ID NO: 862 - protein, 55 aa, synthetic construct
  REGION 1..55: note = ATaRI peptide
NLPAAQLQVRKWAWGPGTSLPWVRGPCAAPISPSRPSLGRLSQGNDWPKSTLRNL

SEQ ID NO: 863 - protein, 43 aa, synthetic construct
  REGION 1..43: note = ATaRI peptide
GGVKYILKVNAPVPLRCLQHSASFREFLSSMNHPWSGFAHAWV

SEQ ID NO: 864 - protein, 24 aa, synthetic construct
  REGION 1..24: note = ATaRI peptide
DDPSKVHPVCGSTAQVLWLVQVHS

SEQ ID NO: 865 - protein, 17 aa, synthetic construct
  REGION 1..17: note = ATaRI peptide
PEPVFSIKVKSPMSAGV

SEQ ID NO: 866 - protein, 35 aa, synthetic construct
  REGION 1..35: note = ATaRI peptide
LCQFPSQQVRAPLPSPTPPGWSHWAGSRSGSISGL

SEQ ID NO: 867 - protein, 9 aa, synthetic construct
  REGION 1..9: note = ATaRI peptide
QSIVQLVQR

SEQ ID NO: 868 - protein, 16 aa, synthetic construct
  REGION 1..16: note = ATaRI peptide
NQLVIMLIVSRKRACY

SEQ ID NO: 869 - protein, 69 aa, synthetic construct
  REGION 1..69: note = ATaRI peptide
VVCMASLEVSRRGPENSTDHASSSVHCRYHAPDPRPHALVNVILSFSLQGSYVNSPILQRKELRLREVK

SEQ ID NO: 870 - protein, 90 aa, synthetic construct
  REGION 1..90: note = ATaRI peptide
MLPSSHPNRYGVGHTQGRPVFLFFLTSVVLSLEGPGKCVWARCWGDISDKHFPCGSSLQRHFLPSNMVIMQSPPPTPALFSTVAMCAYLH

SEQ ID NO: 871 - protein, 28 aa, synthetic construct
  REGION 1..28: note = ATaRI peptide
FRRFEDFTRYPAWPGLQHPEHGGWADFP

SEQ ID NO: 872 - protein, 104 aa, synthetic construct
  REGION 1..104: note = ATaRI peptide
RHSDLITKVRCRRAFLPLSEPGPPFLTFLLCAGSWAACWGWRVHQHPGSCPCYAPVQGRRRTAKWPVITSRLVALGSVSCIMWVSAHEKKISRIEKYWFVQGIS

SEQ ID NO: 873 - protein, 11 aa, synthetic construct
  REGION 1..11: note = ATaRI peptide
MLAGRPHPSKF

SEQ ID NO: 874 - protein, 68 aa, synthetic construct
  REGION 1..68: note = ATaRI peptide
ANLDSEAKVRGPGAVAAGLASGTVESGSWAWGSHPCPANLGGEAGDPVQSLALGGSVPVSLTLSLWVA

SEQ ID NO: 875 - protein, 51 aa, synthetic construct
  REGION 1..51: note = ATaRI peptide
RGFSGGMKGKPLPAYVTPKPWGQHPGQHPLGGDANVLVCAHHHLSCVSQQP

SEQ ID NO: 876 - protein, 15 aa, synthetic construct
  REGION 1..15: note = ATaRI peptide
MLEKGVISVRATAAV

SEQ ID NO: 877 - protein, 32 aa, synthetic construct
  REGION 1..32: note = ATaRI peptide
CDFLKQLKVTKKKKKKKSKTRNSTYVIFTCRL

SEQ ID NO: 878 - protein, 18 aa, synthetic construct
  REGION 1..18: note = ATaRI peptide
TWKILRGKGLWDLLQNVL

SEQ ID NO: 879 - protein, 9 aa, synthetic construct
  REGION 1..9: note = ATaRI peptide
WFSQSVDYG

SEQ ID NO: 880 - protein, 27 aa, synthetic construct
  REGION 1..27: note = ATaRI peptide
QIRLQILTGSQSPGHLLHLSHLADSLS

SEQ ID NO: 881 - protein, 59 aa, synthetic construct
  REGION 1..59: note = ATaRI peptide
IRRSRMLEVSVKPMESYHKEVGPATWKLFSGRSLAFELFLLLLDLKLRLWEQERGHLSC

SEQ ID NO: 882 - protein, 17 aa, synthetic construct
  REGION 1..17: note = ATaRI peptide
MLGKAVYEVGTLRNREM

SEQ ID NO: 883 - protein, 14 aa, synthetic construct
  REGION 1..14: note = ATaRI peptide
YDEDVMGQVGPPFG

SEQ ID NO: 884 - protein, 57 aa, synthetic construct
  REGION 1..57: note = ATaRI peptide
DERAMFLKVFYLLPMHACMYSHKPGRPVDVIIYAEETEIIRRTSDSQHILSHRQASR

SEQ ID NO: 885 - protein, 51 aa, synthetic construct
  REGION 1..51: note = ATaRI peptide
QSLDTSFLGECKEEKPGVLRAYREGSWPGILGCPQGSQGPAISRVFSTLTS

SEQ ID NO: 886 - protein, 9 aa, synthetic construct
  REGION 1..9: note = ATaRI peptide
LKDGDCVNR

SEQ ID NO: 887 - protein, 102 aa, synthetic construct
  REGION 1..102: note = ATaRI peptide
PEQYLVLEVRACLQEPGLLSPHHCPRQWLCNLAVLRIPRKLAHRGQDLPLAYALSWAQVCACHISVSYFQASSWVIPSNWESAREARAWLVLSAMETGLGHF

SEQ ID NO: 888 - protein, 16 aa, synthetic construct
  REGION 1..16: note = ATaRI peptide
ELKLKEVEVGTSPSQP

SEQ ID NO: 889 - protein, 32 aa, synthetic construct
  REGION 1..32: note = ATaRI peptide
TQQIQEELVSLKRQPDIFLSLFCKKGLPLLSI

SEQ ID NO: 890 - protein, 59 aa, synthetic construct
  REGION 1..59: note = ATaRI peptide
AEQGYRPKVGSLPGYRPTPARQTLPGPCSPGPAHRPAPGSALRPSGLFLVSLLLYFSLP

SEQ ID NO: 891 - protein, 16 aa, synthetic construct
  REGION 1..16: note = ATaRI peptide
KENRQGWTGKYTFTII

SEQ ID NO: 892 - protein, 10 aa, synthetic construct
  REGION 1..10: note = ATaRI peptide
RSFIFKGEGE

SEQ ID NO: 893 - protein, 13 aa, synthetic construct
  REGION 1..13: note = ATaRI peptide
VVNGYEAKVKGNS

SEQ ID NO: 894 - protein, 9 aa, synthetic construct
  REGION 1..9: note = ATaRI peptide
KPSGNATDM

SEQ ID NO: 895 - protein, 21 aa, synthetic construct
  REGION 1..21: note = ATaRI peptide
FSTAEIRKVKERKHSNNFFGI

SEQ ID NO: 896 - protein, 11 aa, synthetic construct
  REGION 1..11: note = ATaRI peptide
QKQEQKNQVST

SEQ ID NO: 897 - protein, 41 aa, synthetic construct
  REGION 1..41: note = ATaRI peptide
QQEKRKAIRQVILLFYIEILNIFTNKSFINKIELYKFSIFK

SEQ ID NO: 898 - protein, 14 aa, synthetic construct
  REGION 1..14: note = ATaRI peptide
DSALDYNEVSLFIN

SEQ ID NO: 899 - protein, 23 aa, synthetic construct
  REGION 1..23: note = ATaRI peptide
FGRLCSEMVSGKHTYISIFFFLP

SEQ ID NO: 900 - protein, 12 aa, synthetic construct
  REGION 1..12: note = ATaRI peptide
LDRKQFDVVSLS

SEQ ID NO: 901 - protein, 47 aa, synthetic construct
  REGION 1..47: note = ATaRI peptide
GLEDYGKQGEQEATSPMLVVSSLVLLLLGSESFWVVLSISTPSVRQT

SEQ ID NO: 902 - protein, 33 aa, synthetic construct
  REGION 1..33: note = ATaRI peptide
PSSFPVLRGRNCCWRIVGEQASSPSIWEQTQLK

SEQ ID NO: 903 - protein, 84 aa, synthetic construct
  REGION 1..84: note = ATaRI peptide
NIIMSDADSEFPAGEGLALKVALATCVVAPADPVAPPVPNGVGCCPSGLRIRRQRRACMAWPWPVPSLSLAALCIIRLGHAPAI

SEQ ID NO: 904 - protein, 15 aa, synthetic construct
  REGION 1..15: note = ATaRI peptide
DRPKARNEVCFIAST

SEQ ID NO: 905 - protein, 9 aa, synthetic construct
  REGION 1..9: note = ATaRI peptide
QFPHESSPR

SEQ ID NO: 906 - protein, 10 aa, synthetic construct
  REGION 1..10: note = ATaRI peptide
QASQVTKQAS

SEQ ID NO: 907 - protein, 37 aa, synthetic construct
  REGION 1..37: note = ATaRI peptide
PRSLSDIKGRLAYSALASFSTVFVSLRLYNSYTIERF

SEQ ID NO: 908 - protein, 11 aa, synthetic construct
  REGION 1..11: note = ATaRI peptide
QGFWEEFEVSY

SEQ ID NO: 909 - protein, 9 aa, synthetic construct
  REGION 1..9: note = ATaRI peptide
CTPTPPCAE

SEQ ID NO: 910 - protein, 44 aa, synthetic construct
  REGION 1..44: note = ATaRI peptide
PALRLGIYVSAHAPHTGGWEPRLSGQAMELQKGTFWEGKHCKRT

SEQ ID NO: 911 - protein, 47 aa, synthetic construct
  REGION 1..47: note = ATaRI peptide
RHKRTMVKVMCPPICPSPHSLFSHVTFKPVSLVQFRIHHGPSPCSEV

SEQ ID NO: 912 - protein, 9 aa, synthetic construct
  REGION 1..9: note = ATaRI peptide
CRYCGGVRR

SEQ ID NO: 913 - protein, 53 aa, synthetic construct
  REGION 1..53: note = ATaRI peptide
FMIIFAILGEFPPLRPRCAGKASSRWMKNYFGPGSVAHACNPSILGGQGGWVT

SEQ ID NO: 914 - protein, 9 aa, synthetic construct
  REGION 1..9: note = ATaRI peptide
NQNNTPLLR

SEQ ID NO: 915 - protein, 12 aa, synthetic construct
  REGION 1..12: note = ATaRI peptide
RTALLIFKGKWA

SEQ ID NO: 916 - protein, 9 aa, synthetic construct
  REGION 1..9: note = ATaRI peptide
EYLSSGWNL

SEQ ID NO: 917 - protein, 36 aa, synthetic construct
  REGION 1..36: note = ATaRI peptide
FDNILNSFGEWEKSQGAHSLGTPPLSPLSPRVPEVV

SEQ ID NO: 918 - protein, 33 aa, synthetic construct
  REGION 1..33: note = ATaRI peptide
IFAKTLFQVRPHAELPDGREFVGGGALLILLHI

SEQ ID NO: 919 - protein, 9 aa, synthetic construct
  REGION 1..9: note = ATaRI peptide
QKLWEVYSG

SEQ ID NO: 920 - protein, 9 aa, synthetic construct
  REGION 1..9: note = ATaRI peptide
LLTKMADIE

SEQ ID NO: 921 - protein, 74 aa, synthetic construct
  REGION 1..74: note = ATaRI peptide
LEEALAEKVSGWPQLSTHVFCFLINLRLDIEYKRNPCGHKGKELLCAIADIRSVKGNIFFRWSLTLCPGWSAVA

SEQ ID NO: 922 - protein, 52 aa, synthetic construct
  REGION 1..52: note = ATaRI peptide
QGDLSEKEVKLPKMELVCLLNHCMCLYVGVYIMHIKKYSMENFLNILLAGFC

SEQ ID NO: 923 - protein, 75 aa, synthetic construct
  REGION 1..75: note = ATaRI peptide
VGAASRTKVSPAARPAARSGGGTAGGGGGAVRERGGAASGAWGCVEGPPGVAGLGEVTPIRAGVAGKPWVRYTRP

SEQ ID NO: 924 - protein, 22 aa, synthetic construct
  REGION 1..22: note = ATaRI peptide
RQLQQLQEGWCVIESCISKYAS

SEQ ID NO: 925 - protein, 41 aa, synthetic construct
  REGION 1..41: note = ATaRI peptide
FRYRSPHSGESLDSWHMPNLESLLVSGWSLTPLTRPKKSQQ

SEQ ID NO: 926 - protein, 16 aa, synthetic construct
  REGION 1..16: note = ATaRI peptide
ISSVGANEVGTTLPHL

SEQ ID NO: 927 - protein, 17 aa, synthetic construct
  REGION 1..17: note = ATaRI peptide
ARLWGNHKVKGQQISAP

SEQ ID NO: 928 - protein, 33 aa, synthetic construct
  REGION 1..33: note = ATaRI peptide
QWTHDPSEVLFLPPLVLWVPAHSKQITFPRDCR

SEQ ID NO: 929 - protein, 26 aa, synthetic construct
  REGION 1..26: note = ATaRI peptide
SQKCSDVSGMNTVILYHMRAGGGCTV

SEQ ID NO: 930 - protein, 26 aa, synthetic construct
  REGION 1..26: note = ATaRI peptide
EAAIQELKVRGCIGDAKPFHFLGVLW

SEQ ID NO: 931 - protein, 28 aa, synthetic construct
  REGION 1..28: note = ATaRI peptide
IAGYSMSEVRPSCRNGGSGSSINLISLR

SEQ ID NO: 932 - protein, 16 aa, synthetic construct
  REGION 1..16: note = ATaRI peptide
EENKKQGKCKFRNFHL

SEQ ID NO: 933 - protein, 44 aa, synthetic construct
  REGION 1..44: note = ATaRI peptide
PATSDPLSGKGRGWSAQGCQTYYTCTAIPAWIQWQTSLIRLFPF

SEQ ID NO: 934 - protein, 17 aa, synthetic construct
  REGION 1..17: note = ATaRI peptide
EIAKPCVSGRPLRCGDH

SEQ ID NO: 935 - protein, 30 aa, synthetic construct
  REGION 1..30: note = ATaRI peptide
EHLFPAAQVRVQPQQPTIVVCPLLLDEWWQ

SEQ ID NO: 936 - protein, 46 aa, synthetic construct
  REGION 1..46: note = ATaRI peptide
QEQRLCPEVRRGPGVVGQVLRVPGGGASRKKQKCGPWGVFEPTDIY

SEQ ID NO: 937 - protein, 79 aa, synthetic construct
  REGION 1..79: note = ATaRI peptide
FDILVFGTVSLVSQLRAPASYDCVLITAVGPPWREGFWSQPSASTGHFAHGIKEEEDVLGLLSLNESSDEYRSGPGKQF

SEQ ID NO: 938 - protein, 22 aa, synthetic construct
  REGION 1..22: note = ATaRI peptide
ENEENQKSCRFIFSFFPCSIFP

SEQ ID NO: 939 - protein, 9 aa, synthetic construct
  REGION 1..9: note = ATaRI peptide
EAYLPKKNG

SEQ ID NO: 940 - protein, 37 aa, synthetic construct
  REGION 1..37: note = ATaRI peptide
PTSEKMDEVPPCLSICLGLVLSILYLPFPLQAFSMTS

SEQ ID NO: 941 - protein, 95 aa, synthetic construct
  REGION 1..95: note = ATaRI peptide
DKKERMAKVGGWVQGSAGWLWRGAGPQPGTSSFPETVNWKRCRGPHYGSSISCGHFQSSANCAPLQQPLDAHGSLNLNEWPGMVAYTFNPSTLGG

SEQ ID NO: 942 - protein, 67 aa, synthetic construct
  REGION 1..67: note = ATaRI peptide
DTLWVYHPYILLAWGALHLLGCRKSLLTSLGPTTQSVAARGAHEGDSMHHRHFPSRVCVPAPCQAPE

SEQ ID NO: 943 - protein, 40 aa, synthetic construct
  REGION 1..40: note = ATaRI peptide
DEPPADTQVLPGLLDTSEPAGLGHGDPGHSWRGARQREEL

SEQ ID NO: 944 - protein, 9 aa, synthetic construct
  REGION 1..9: note = ATaRI peptide
AAIEKVRKW

SEQ ID NO: 945 - protein, 150 aa, synthetic construct
  REGION 1..150: note = ATaRI peptide
VTEPKVDDVSMEGWSPGVGHPFVLLPPWGGRLSTATHRAGALGPRAPGSRRTQIRPGEAAVPVPTPPTPAPESGPQSGGRGDPASCVFFFFFFFFLIQSLTLPPRLECSGVILAHCILCLVSSSDSPASASRVAGITGAHHHTQPIFSYF

SEQ ID NO: 946 - protein, 10 aa, synthetic construct
  REGION 1..10: note = ATaRI peptide
REPIGLSGVR

SEQ ID NO: 947 - protein, 18 aa, synthetic construct
  REGION 1..18: note = ATaRI peptide
SLQLHLVFGKYNVVNEVR

SEQ ID NO: 948 - protein, 16 aa, synthetic construct
  REGION 1..16: note = ATaRI peptide
QYLWLRHRVTCFTFFP

SEQ ID NO: 949 - protein, 28 aa, synthetic construct
  REGION 1..28: note = ATaRI peptide
NLLNKEIMVSTLFEESFFSFISGAIWKA

SEQ ID NO: 950 - protein, 16 aa, synthetic construct
  REGION 1..16: note = ATaRI peptide
EEPDHSKEVTFSLSKI

SEQ ID NO: 951 - protein, 64 aa, synthetic construct
  REGION 1..64: note = ATaRI peptide
FKEVASLQVNILSHVKHYYLTNQCIFPSLKFSVWLGAVAYPCNPSTLGGQGEWITRSGDRDHPG

SEQ ID NO: 952 - protein, 12 aa, synthetic construct
  REGION 1..12: note = ATaRI peptide
SLSGILHKVDTQ

SEQ ID NO: 953 - protein, 9 aa, synthetic construct
  REGION 1..9: note = ATaRI peptide
VNYLANDLR

SEQ ID NO: 954 - protein, 15 aa, synthetic construct
  REGION 1..15: note = ATaRI peptide
TAPCEILKVKLMESS

SEQ ID NO: 955 - protein, 11 aa, synthetic construct
  REGION 1..11: note = ATaRI peptide
EEKKKQKRGKT

SEQ ID NO: 956 - protein, 44 aa, synthetic construct
  REGION 1..44: note = ATaRI peptide
PVKEKHARRILGRLLDPGVGCGCGSSVVLQVACGQLCRGHKFPH

SEQ ID NO: 957 - protein, 25 aa, synthetic construct
  REGION 1..25: note = ATaRI peptide
KLLFKLHSCEWPRATPGPEGCVYMA

SEQ ID NO: 958 - protein, 31 aa, synthetic construct
  REGION 1..31: note = ATaRI peptide
SGKEEGMKVRGCCACCIIAKAGRAHLPWSRG

SEQ ID NO: 959 - protein, 9 aa, synthetic construct
  REGION 1..9: note = ATaRI peptide
FQYLSKTYW

SEQ ID NO: 960 - protein, 27 aa, synthetic construct
  REGION 1..27: note = ATaRI peptide
EEKLKKSQVRTTKVIYFHLVIREFTLD

SEQ ID NO: 961 - protein, 36 aa, synthetic construct
  REGION 1..36: note = ATaRI peptide
LLDMGFEARYWTLDFTGLSGQMILIQKGSKMEFTVS

SEQ ID NO: 962 - protein, 35 aa, synthetic construct
  REGION 1..35: note = ATaRI peptide
SRLENYYMVSAWACFLLSDNDQCSFYGNCTGRINM

SEQ ID NO: 963 - protein, 117 aa, synthetic construct
  REGION 1..117: note = ATaRI peptide
QEKHLVFFRYSSGLCGRGIRDSARMCRCMRPLGFGFHLAWFSPECFWLQITENPTFVVRTRLALFFSRKKSSKGRQFLTWVSCVSHVKVNVDVIGLLFLCVTSWILDDHYYTLSCLH

SEQ ID NO: 964 - protein, 33 aa, synthetic construct
  REGION 1..33: note = ATaRI peptide
FMEFRKLQRWVGFIEGSSSPATLLFQVPKCPIL

SEQ ID NO: 965 - protein, 10 aa, synthetic construct
  REGION 1..10: note = ATaRI peptide
QEMKSRILVR

SEQ ID NO: 966 - protein, 51 aa, synthetic construct
  REGION 1..51: note = ATaRI peptide
DVRCCCDQVCSLVIGHKSYATCENTSSSTNSFFHFLFLEIGSCSVTQAGVW

SEQ ID NO: 967 - protein, 16 aa, synthetic construct
  REGION 1..16: note = ATaRI peptide
KAYFTIPQVIVAILVC

SEQ ID NO: 968 - protein, 10 aa, synthetic construct
  REGION 1..10: note = ATaRI peptide
LDKFITNTGI

SEQ ID NO: 969 - protein, 36 aa, synthetic construct
  REGION 1..36: note = ATaRI peptide
QEILGVETRYDHILDHRSLERVRKVESIPNNREMFI

SEQ ID NO: 970 - protein, 9 aa, synthetic construct
  REGION 1..9: note = ATaRI peptide
QEKETFREK

SEQ ID NO: 971 - protein, 9 aa, synthetic construct
  REGION 1..9: note = ATaRI peptide
DMSLDEAYR

SEQ ID NO: 972 - protein, 73 aa, synthetic construct
  REGION 1..73: note = ATaRI peptide
GAACGLALGESRARGRACGGWAGAVQGGWVVSPWLVSRFWGWRSHLMAGRPSDCGVPPSLGEHHPSTAPPGTS

SEQ ID NO: 973 - protein, 27 aa, synthetic construct
  REGION 1..27: note = ATaRI peptide
VSTYHMGLVSVPLLFSLVLSLDMVMAE

SEQ ID NO: 974 - protein, 84 aa, synthetic construct
  REGION 1..84: note = ATaRI peptide
KTDANSNSCKCHQWENLYLRECLGWAQWLMTVILALWEAEVGRSLEPRSSRPDRATWQNPISTKKYKNSLGMGVHACNPSYLGD

SEQ ID NO: 975 - protein, 9 aa, synthetic construct
  REGION 1..9: note = ATaRI peptide
NKEATCNRR

SEQ ID NO: 976 - protein, 28 aa, synthetic construct
  REGION 1..28: note = ATaRI peptide
LSAASPNSVSEPGRVPFLLCQMAAAVQG

SEQ ID NO: 977 - protein, 74 aa, synthetic construct
  REGION 1..74: note = ATaRI peptide
EEEPSKQRGEWGAAWTAGVGLHVYAQAACTVVQSAEHISGTHDSTTMTTGENGSDIPSFGKTKLKTRMINGGGK

SEQ ID NO: 978 - protein, 25 aa, synthetic construct
  REGION 1..25: note = ATaRI peptide
NRLEELMKVFISLLNYIFMPPQNFC

SEQ ID NO: 979 - protein, 11 aa, synthetic construct
  REGION 1..11: note = ATaRI peptide
KEGGDSMQVRV

SEQ ID NO: 980 - protein, 41 aa, synthetic construct
  REGION 1..41: note = ATaRI peptide
QEELEAKQGLLIAFKLLERKEIHKYKIYLLSQKISRLPTRI

SEQ ID NO: 981 - protein, 17 aa, synthetic construct
  REGION 1..17: note = ATaRI peptide
VMVPAQFPGQGARWAWR

SEQ ID NO: 982 - protein, 32 aa, synthetic construct
  REGION 1..32: note = ATaRI peptide
TAGGTGAKVGAQSQQCSAEHRPTLFPLYRGVS

SEQ ID NO: 983 - protein, 48 aa, synthetic construct
  REGION 1..48: note = ATaRI peptide
QQLMPTAQGKAQQQSQLPAQEQAAHCGSRNQHQTQTWAVEVACLQWGA

SEQ ID NO: 984 - protein, 81 aa, synthetic construct
  REGION 1..81: note = ATaRI peptide
WKVAAAKKVGWNAWSCCAVCVGGGLSLQWCKWWGGLQTHFFFFFFFFSPRQGLALLSRLECPANFVFFATLPRLVLNPGLK

SEQ ID NO: 985 - protein, 12 aa, synthetic construct
  REGION 1..12: note = ATaRI peptide
NLQKVSRRGRTL

SEQ ID NO: 986 - protein, 57 aa, synthetic construct
  REGION 1..57: note = ATaRI peptide
SISLTDDEGLFPLSTIFVISRAADEMTQSCSDLGFSLVIFSWLESSTFVFIQMSLSV

SEQ ID NO: 987 - protein, 19 aa, synthetic construct
  REGION 1..19: note = ATaRI peptide
GEDTSGEEGALPAFGRIQG

SEQ ID NO: 988 - protein, 21 aa, synthetic construct
  REGION 1..21: note = ATaRI peptide
FAHLACNEGKSLLVFLTIPIC

SEQ ID NO: 989 - protein, 12 aa, synthetic construct
  REGION 1..12: note = ATaRI peptide
RELKAKRQVFFF

SEQ ID NO: 990 - protein, 9 aa, synthetic construct
  REGION 1..9: note = ATaRI peptide
YEDVILQPG

SEQ ID NO: 991 - protein, 33 aa, synthetic construct
  REGION 1..33: note = ATaRI peptide
AAAKLKASRCVRPRGSGEGWLPGPPQLTQVYAW

SEQ ID NO: 992 - protein, 63 aa, synthetic construct
  REGION 1..63: note = ATaRI peptide
FSANPEAKGRLHVVVCSPPYGGFCGTSSWHFLLAPLDAVIVPEWEQAPPAGFLKVPCLVLDEF

SEQ ID NO: 993 - protein, 72 aa, synthetic construct
  REGION 1..72: note = ATaRI peptide
AGQPLQLQGKDKDERALMPKMTKAPHHEPCCPRACLVHLSVRLFPVSDDASHLMGSWKTSEMTFISHRVACT

SEQ ID NO: 994 - protein, 16 aa, synthetic construct
  REGION 1..16: note = ATaRI peptide
QEKERNSEVRESTFGQ

SEQ ID NO: 995 - protein, 32 aa, synthetic construct
  REGION 1..32: note = ATaRI peptide
QVASASQQVGRIDKVETSHFPGQRMGCFHLRS

SEQ ID NO: 996 - protein, 70 aa, synthetic construct
  REGION 1..70: note = ATaRI peptide
SSRDPLSDVSTQLPAPGGSESGPPARCAPHKGVQSESGPPAHCALHKGVQSESGPPARCTLHKGVQEAAG

SEQ ID NO: 997 - protein, 20 aa, synthetic construct
  REGION 1..20: note = ATaRI peptide
LFAPGTDKGKWVPSAQLLGL

SEQ ID NO: 998 - protein, 208 aa, synthetic construct
  REGION 1..208: note = ATaRI peptide
LQGAFQPKVPLPLAGGAGTAGGWILGGVHDNLAKLSAHNHPPFPPLYLSSSGCWREQPLPGWGALRSVCGHRGRDRGSSLGAALGGGGTVWRAHCGSLEGEHSSPWQEALVWTAASQAVLTARRFLRGHPHCEEVLTGPSTPWGTRALRGRPHPQGTWVAGGCVPSQPGEREPRDPPHCSWPCAVTPPSAEGHTALSPEAASPVGLRF

SEQ ID NO: 999 - protein, 28 aa, synthetic construct
  REGION 1..28: note = ATaRI peptide
YRHQQKIKVRPPGLGQGACEPDSSLVGP

SEQ ID NO: 1000 - protein, 10 aa, synthetic construct
  REGION 1..10: note = ATaRI peptide
KISRQSCPGG

SEQ ID NO: 1001 - protein, 28 aa, synthetic construct
  REGION 1..28: note = ATaRI peptide
EIPSSDSPGECMRTRQMGESRSPMSSGQ

SEQ ID NO: 1002 - protein, 22 aa, synthetic construct
  REGION 1..22: note = ATaRI peptide
NHKPSPDQVRWLWNVLLKNPHT

SEQ ID NO: 1003 - protein, 20 aa, synthetic construct
  REGION 1..20: note = ATaRI peptide
SFQTPVNTGNFFFKYQNTFS

SEQ ID NO: 1004 - protein, 9 aa, synthetic construct
  REGION 1..9: note = ATaRI peptide
ATAAADFTA

SEQ ID NO: 1005 - protein, 9 aa, synthetic construct
  REGION 1..9: note = ATaRI peptide
LSADDKTVR

SEQ ID NO: 1006 - protein, 57 aa, synthetic construct
  REGION 1..57: note = ATaRI peptide
SIAFHSAVRYVQEILSFSFLGNKRHFGYLKMGRYLLFLKVKRPGVVAYAYNRSTLGS

SEQ ID NO: 1007 - protein, 19 aa, synthetic construct
  REGION 1..19: note = ATaRI peptide
KALNMHDKGNVVVCDLCGV

SEQ ID NO: 1008 - protein, 15 aa, synthetic construct
  REGION 1..15: note = ATaRI peptide
HPMSPVGRVSYFALY

SEQ ID NO: 1009 - protein, 46 aa, synthetic construct
  REGION 1..46: note = ATaRI peptide
KLEAHSPKVSYGEICLCRLPSSLILKHSSVNMISIISVEHEPIPSL

SEQ ID NO: 1010 - protein, 45 aa, synthetic construct
  REGION 1..45: note = ATaRI peptide
LDHLGEVQVQKYNILYIVLTVFTGTVQSTLLDLRIPITVFTLLAT

SEQ ID NO: 1011 - protein, 17 aa, synthetic construct
  REGION 1..17: note = ATaRI peptide
QQRGTTEIGKLALHFIL

SEQ ID NO: 1012 - protein, 25 aa, synthetic construct
  REGION 1..25: note = ATaRI peptide
STVKYKNEVSLDCFSNYKLLLMLKR

SEQ ID NO: 1013 - protein, 12 aa, synthetic construct
  REGION 1..12: note = ATaRI peptide
EIETSVVKGQHL

SEQ ID NO: 1014 - protein, 16 aa, synthetic construct
  REGION 1..16: note = ATaRI peptide
KKMMDLRTVFNWKLIF

SEQ ID NO: 1015 - protein, 36 aa, synthetic construct
  REGION 1..36: note = ATaRI peptide
DNPFRTTQVYELHLIIILCKSSITEFWNQSYMIDRS

SEQ ID NO: 1016 - protein, 9 aa, synthetic construct
  REGION 1..9: note = ATaRI peptide
KMPEDVTFR

SEQ ID NO: 1017 - protein, 9 aa, synthetic construct
  REGION 1..9: note = ATaRI peptide
LLLDPNIYR

SEQ ID NO: 1018 - protein, 23 aa, synthetic construct
  REGION 1..23: note = ATaRI peptide
KDKLAIPKVGSNDIPLKGLNYFF

SEQ ID NO: 1019 - protein, 27 aa, synthetic construct
  REGION 1..27: note = ATaRI peptide
KLQEAPSSRWHTAPAGLMSLREVTCQK

SEQ ID NO: 1020 - protein, 10 aa, synthetic construct
  REGION 1..10: note = ATaRI peptide
KAKKQSRPGK

SEQ ID NO: 1021 - protein, 9 aa, synthetic construct
  REGION 1..9: note = ATaRI peptide
LTPPVICSR

SEQ ID NO: 1022 - protein, 19 aa, synthetic construct
  REGION 1..19: note = ATaRI peptide
APETMMFLVVPYHLTHSFT

SEQ ID NO: 1023 - protein, 12 aa, synthetic construct
  REGION 1..12: note = ATaRI peptide
EIGYRDIPCKYM

SEQ ID NO: 1024 - protein, 11 aa, synthetic construct
  REGION 1..11: note = ATaRI peptide
TCENNESPSKF

SEQ ID NO: 1025 - protein, 13 aa, synthetic construct
  REGION 1..13: note = ATaRI peptide
KAVTNFKQVRTFV

SEQ ID NO: 1026 - protein, 70 aa, synthetic construct
  REGION 1..70: note = ATaRI peptide
ASQIAGITGVSHRAQPGKFSVVISLNTCSTPLSFLSPSITPIIQRFAHLMPSFNSLLLCSFSFFFLLLPF

SEQ ID NO: 1027 - protein, 11 aa, synthetic construct
  REGION 1..11: note = ATaRI peptide
IRDTDSAQVTF

SEQ ID NO: 1028 - protein, 28 aa, synthetic construct
  REGION 1..28: note = ATaRI peptide
RWSEIQKGGNLFSVFILADFIENQFFCI

SEQ ID NO: 1029 - protein, 30 aa, synthetic construct
  REGION 1..30: note = ATaRI peptide
YCQLFSLKWQVIFFIVEKMSAKYSSLITLV

SEQ ID NO: 1030 - protein, 12 aa, synthetic construct
  REGION 1..12: note = ATaRI peptide
GQATKRLQVGTL

SEQ ID NO: 1031 - protein, 24 aa, synthetic construct
  REGION 1..24: note = ATaRI peptide
ASHADIERGKMLINMVYFPFILTA

SEQ ID NO: 1032 - protein, 37 aa, synthetic construct
  REGION 1..37: note = ATaRI peptide
RELQQENKGKIRYFLTLIPFLVYIPKSYLLLFILSHI

SEQ ID NO: 1033 - protein, 67 aa, synthetic construct
  REGION 1..67: note = ATaRI peptide
DREDRSCPGEAARTCGLRGPVVFPEDSFIFLSVVLTGSLSFGGWEEKQELFSFLINFNPPREISCSG

SEQ ID NO: 1034 - protein, 9 aa, synthetic construct
  REGION 1..9: note = ATaRI peptide
SDMLEKEQV

SEQ ID NO: 1035 - protein, 14 aa, synthetic construct
  REGION 1..14: note = ATaRI peptide
EGVDWEHIRYVPRL

SEQ ID NO: 1036 - protein, 9 aa, synthetic construct
  REGION 1..9: note = ATaRI peptide
EQKWESLKV

SEQ ID NO: 1037 - protein, 11 aa, synthetic construct
  REGION 1..11: note = ATaRI peptide
VVLAQGKKGRV

SEQ ID NO: 1038 - protein, 9 aa, synthetic construct
  REGION 1..9: note = ATaRI peptide
DTQLCDKLL

SEQ ID NO: 1039 - protein, 74 aa, synthetic construct
  REGION 1..74: note = ATaRI peptide
LTATAKVKVGSGSYGLIIAWRKGNVLSVTWLFCFLGFTKFCGWVPYQQMQESSALSCLGRKMLANRQLTDRELY

SEQ ID NO: 1040 - protein, 17 aa, synthetic construct
  REGION 1..17: note = ATaRI peptide
RARVVVLRVRVFFIFFF

SEQ ID NO: 1041 - protein, 9 aa, synthetic construct
  REGION 1..9: note = ATaRI peptide
DVLTIKTDR

SEQ ID NO: 1042 - protein, 9 aa, synthetic construct
  REGION 1..9: note = ATaRI peptide
SLASVLSSR

SEQ ID NO: 1043 - protein, 26 aa, synthetic construct
  REGION 1..26: note = ATaRI peptide
ALEKLDVTVSGKPGRAEHSCVFHMER

SEQ ID NO: 1044 - protein, 18 aa, synthetic construct
  REGION 1..18: note = ATaRI peptide
EALVSAAKVFPSVIVGCL

SEQ ID NO: 1045 - protein, 9 aa, synthetic construct
  REGION 1..9: note = ATaRI peptide
LEKEENQKV

SEQ ID NO: 1046 - protein, 34 aa, synthetic construct
  REGION 1..34: note = ATaRI peptide
FQIVHKNDRKPPGGVGWEEEDRCSYRMGMHIPCT

SEQ ID NO: 1047 - protein, 97 aa, synthetic construct
  REGION 1..97: note = ATaRI peptide
PGRPAVSGVSGLPRAGGQASPLLLPPPCSEEPEALASPDFSHLSPLGQGSQGRREQGPKGHTHPGLAGIGTAFLGSSAMTPQTSQGGRGSFQELTTW

SEQ ID NO: 1048 - protein, 15 aa, synthetic construct
  REGION 1..15: note = ATaRI peptide
KQVVEKVEVGGHPGG

SEQ ID NO: 1049 - protein, 17 aa, synthetic construct
  REGION 1..17: note = ATaRI peptide
HVTEWQLRGIVALVKYS

SEQ ID NO: 1050 - protein, 9 aa, synthetic construct
  REGION 1..9: note = ATaRI peptide
ELEKRMQEW

SEQ ID NO: 1051 - protein, 28 aa, synthetic construct
  REGION 1..28: note = ATaRI peptide
KFLHTKNKVITHAYNEEIMLKKIYCMNT

SEQ ID NO: 1052 - protein, 13 aa, synthetic construct
  REGION 1..13: note = ATaRI peptide
ISREVDPDGKDRC

SEQ ID NO: 1053 - protein, 15 aa, synthetic construct
  REGION 1..15: note = ATaRI peptide
LGIIGVVNRLAVRMG

SEQ ID NO: 1054 - protein, 31 aa, synthetic construct
  REGION 1..31: note = ATaRI peptide
HKVQPRNKVCFKILNYKFMCSQVHNYNELVL

SEQ ID NO: 1055 - protein, 10 aa, synthetic construct
  REGION 1..10: note = ATaRI peptide
ALSCLALLSK

SEQ ID NO: 1056 - protein, 38 aa, synthetic construct
  REGION 1..38: note = ATaRI peptide
EKIGDEDGQLVVLILYDRKFQLYFKSIPIKYLNRNFYC

SEQ ID NO: 1057 - protein, 38 aa, synthetic construct
  REGION 1..38: note = ATaRI peptide
SKEFCAYQVCFISVSLCVLWQLIDYTCAICNGYPLGFK

SEQ ID NO: 1058 - protein, 38 aa, synthetic construct
  REGION 1..38: note = ATaRI peptide
LSTLLEQNGKQWAMFSNKGKHIFVVFLIIEAIYCEKFT

SEQ ID NO: 1059 - protein, 9 aa, synthetic construct
  REGION 1..9: note = ATaRI peptide
MLNHLFEGR

SEQ ID NO: 1060 - protein, 35 aa, synthetic construct
  REGION 1..35: note = ATaRI peptide
DVAEIQTKVCALSWKEFGNLCEFHFWSSLCNSHFA

SEQ ID NO: 1061 - protein, 10 aa, synthetic construct
  REGION 1..10: note = ATaRI peptide
LQRHSNSLVS

SEQ ID NO: 1062 - protein, 20 aa, synthetic construct
  REGION 1..20: note = ATaRI peptide
SFPQQLCEVNLIYPCNFQDI

SEQ ID NO: 1063 - protein, 26 aa, synthetic construct
  REGION 1..26: note = ATaRI peptide
FSARMNFLGKCSVWVSSLPGPLSCTR

SEQ ID NO: 1064 - protein, 31 aa, synthetic construct
  REGION 1..31: note = ATaRI peptide
KPWLFNIKVICSDHLKIENNSCVCVRVCVCV

SEQ ID NO: 1065 - protein, 21 aa, synthetic construct
  REGION 1..21: note = ATaRI peptide
AVHFLNESGLCFSFLIFKAQL

SEQ ID NO: 1066 - protein, 23 aa, synthetic construct
  REGION 1..23: note = ATaRI peptide
WLCKIMAQVGVFYFCGTGVMVKA

SEQ ID NO: 1067 - protein, 13 aa, synthetic construct
  REGION 1..13: note = ATaRI peptide
EQAPEFLLGNSFC

SEQ ID NO: 1068 - protein, 14 aa, synthetic construct
  REGION 1..14: note = ATaRI peptide
NTEGYTSEVNPNAL

SEQ ID NO: 1069 - protein, 65 aa, synthetic construct
  REGION 1..65: note = ATaRI peptide
YCNSFSKQRYGSEFDQWGNYRSFKRLNCVHNCYCISKDCSFLAYFHWFAYIKGNCGRSQRYLLFF

SEQ ID NO: 1070 - protein, 20 aa, synthetic construct
  REGION 1..20: note = ATaRI peptide
IFEDKTVKVNVECILHLNLF

SEQ ID NO: 1071 - protein, 27 aa, synthetic construct
  REGION 1..27: note = ATaRI peptide
GSAVSSSKVCYISKISLKKNYKLRWTD

SEQ ID NO: 1072 - protein, 34 aa, synthetic construct
  REGION 1..34: note = ATaRI peptide
DIQTLILQVKNVFWQTKMAFIHRCSSMSHTLSVM

SEQ ID NO: 1073 - protein, 9 aa, synthetic construct
  REGION 1..9: note = ATaRI peptide
HHIHRDIKR

SEQ ID NO: 1074 - protein, 25 aa, synthetic construct
  REGION 1..25: note = ATaRI peptide
EHREPQLLVNEIFIFLNPFFSAFVV

SEQ ID NO: 1075 - protein, 10 aa, synthetic construct
  REGION 1..10: note = ATaRI peptide
KAAFPLHDVS

SEQ ID NO: 1076 - protein, 22 aa, synthetic construct
  REGION 1..22: note = ATaRI peptide
DLGNHTTCRQVLLYLFKNALHL

SEQ ID NO: 1077 - protein, 11 aa, synthetic construct
  REGION 1..11: note = ATaRI peptide
ANAGVFDDSKF

SEQ ID NO: 1078 - protein, 20 aa, synthetic construct
  REGION 1..20: note = ATaRI peptide
IAKVEKSIGKTGPKNTYFLY

SEQ ID NO: 1079 - protein, 9 aa, synthetic construct
  REGION 1..9: note = ATaRI peptide
DSEKFACQW

SEQ ID NO: 1080 - protein, 15 aa, synthetic construct
  REGION 1..15: note = ATaRI peptide
MLDTLDRTGEFINRF

SEQ ID NO: 1081 - protein, 15 aa, synthetic construct
  REGION 1..15: note = ATaRI peptide
PLATSKKLSKSEAHL

SEQ ID NO: 1082 - protein, 20 aa, synthetic construct
  REGION 1..20: note = ATaRI peptide
KSIDSFGQGEMVRGSGHYRW

SEQ ID NO: 1083 - protein, 11 aa, synthetic construct
  REGION 1..11: note = ATaRI peptide
ATSGAHPEGKS

SEQ ID NO: 1084 - protein, 11 aa, synthetic construct
  REGION 1..11: note = ATaRI peptide
IPETTPIEVNY

SEQ ID NO: 1085 - protein, 29 aa, synthetic construct
  REGION 1..29: note = ATaRI peptide
QSDTDAQQVRRKHFLIQVHPSGKISSGIF

SEQ ID NO: 1086 - protein, 46 aa, synthetic construct
  REGION 1..46: note = ATaRI peptide
DVFANTRIGRSWIYPRSPNYIPFGSQYPGNSLWFVLGFSVWPKKKN

SEQ ID NO: 1087 - protein, 63 aa, synthetic construct
  REGION 1..63: note = ATaRI peptide
SQACNYSEGQTSSHDCPHCYLQRCVTVSTMLSDWTSFNDRIQSEMSQDTFLACFCFLLLKNML

SEQ ID NO: 1088 - protein, 25 aa, synthetic construct
  REGION 1..25: note = ATaRI peptide
IVTDGANPCEYFFIVDLGISCVLID

SEQ ID NO: 1089 - protein, 32 aa, synthetic construct
  REGION 1..32: note = ATaRI peptide
EAMTVAIRRYCSGCQMLLMYVTTWMKCAVFTR

SEQ ID NO: 1090 - protein, 19 aa, synthetic construct
  REGION 1..19: note = ATaRI peptide
DVGHVMPGGESQGASFGFS

SEQ ID NO: 1091 - protein, 26 aa, synthetic construct
  REGION 1..26: note = ATaRI peptide
GLLGFVGPVSDAFMLILLHLIQIFGL

SEQ ID NO: 1092 - protein, 9 aa, synthetic construct
  REGION 1..9: note = ATaRI peptide
SIKTVYRGR

SEQ ID NO: 1093 - protein, 35 aa, synthetic construct
  REGION 1..35: note = ATaRI peptide
QWMSRVLQVSTLWGLCQVSGGSNHCLSISFSSISQ

SEQ ID NO: 1094 - protein, 18 aa, synthetic construct
  REGION 1..18: note = ATaRI peptide
PKPRQKQPGNMLASKTWH

SEQ ID NO: 1095 - protein, 16 aa, synthetic construct
  REGION 1..16: note = ATaRI peptide
LFMLLNAKVLKIQWYI

SEQ ID NO: 1096 - protein, 22 aa, synthetic construct
  REGION 1..22: note = ATaRI peptide
NVVLLYPPGKHWIGRLEFKLQY

SEQ ID NO: 1097 - protein, 53 aa, synthetic construct
  REGION 1..53: note = ATaRI peptide
PTVRMIVDVSTSCILPCPHLLKSRFRQLRILTNFPILLSQEFKFVFWRLPPFC

SEQ ID NO: 1098 - protein, 62 aa, synthetic construct
  REGION 1..62: note = ATaRI peptide
TWPTIIDTGERETSSEGGGTESSQYLRSPPFSCQTCLPCLYVFCLLRQRQNLGSVSLCRTRH

SEQ ID NO: 1099 - protein, 48 aa, synthetic construct
  REGION 1..48: note = ATaRI peptide
TGMLTGVKVRCMLEKCHICQKIEMTTAPETIDAEAKWLYQRPVGRVKI

SEQ ID NO: 1100 - protein, 9 aa, synthetic construct
  REGION 1..9: note = ATaRI peptide
GFALWCLCR

SEQ ID NO: 1101 - protein, 54 aa, synthetic construct
  REGION 1..54: note = ATaRI peptide
GNQVEVLKVRSSSSRWPVPKGSEEMRQDVTGPEQGLTDMFACLFQVTQLKKGVF

SEQ ID NO: 1102 - protein, 52 aa, synthetic construct
  REGION 1..52: note = ATaRI peptide
VNVAICLQVTLMKSCLLTNGRGIWSIPEHGLWSQAAWAWAPAALTCFGTSGF

SEQ ID NO: 1103 - protein, 57 aa, synthetic construct
  REGION 1..57: note = ATaRI peptide
DLKSLRHDRYNRFINAPFLLVPKHNKFGTSKPAFSLIPFVHIFQEGNGKREGICFYH

SEQ ID NO: 1104 - protein, 36 aa, synthetic construct
  REGION 1..36: note = ATaRI peptide
LLLSESGKVICSVDHGEGGLCGEVVQFKETRSHIIY

SEQ ID NO: 1105 - protein, 16 aa, synthetic construct
  REGION 1..16: note = ATaRI peptide
TELTAATGGTSATTPH

SEQ ID NO: 1106 - protein, 38 aa, synthetic construct
  REGION 1..38: note = ATaRI peptide
YQTSSGQYSMYRNQFPHYKHTKPDFSVERNGVRKTVIL

SEQ ID NO: 1107 - protein, 9 aa, synthetic construct
  REGION 1..9: note = ATaRI peptide
REIRLMKNR

SEQ ID NO: 1108 - protein, 58 aa, synthetic construct
  REGION 1..58: note = ATaRI peptide
SQAGIKCQVSPSWPEIVYLHQGQRGEVWVPLNMGGPFRGGFPMVVNTLQFHNPPPSTE

SEQ ID NO: 1109 - protein, 16 aa, synthetic construct
  REGION 1..16: note = ATaRI peptide
RIDLRVPSGECMPLLG

SEQ ID NO: 1110 - protein, 19 aa, synthetic construct
  REGION 1..19: note = ATaRI peptide
RARFLFPLSKLFLFKTITF

SEQ ID NO: 1111 - protein, 28 aa, synthetic construct
  REGION 1..28: note = ATaRI peptide
HMEIVGTQGEWTSAGAAKWCRHERSAVS

SEQ ID NO: 1112 - protein, 21 aa, synthetic construct
  REGION 1..21: note = ATaRI peptide
HSKKTVKKAGNGVIPQTHTVW

SEQ ID NO: 1113 - protein, 23 aa, synthetic construct
  REGION 1..23: note = ATaRI peptide
QRHKRTHTGEQEPMGEKNSNRLE

SEQ ID NO: 1114 - protein, 9 aa, synthetic construct
  REGION 1..9: note = ATaRI peptide
EVGGPGTVG

SEQ ID NO: 1115 - protein, 64 aa, synthetic construct
  REGION 1..64: note = ATaRI peptide
LLVLLLWKVRLGGGADGGGLPGWVSSILYCGSVTHPHTHVFSKSALNTCPACLRNSISPWMFQR

SEQ ID NO: 1116 - protein, 83 aa, synthetic construct
  REGION 1..83: note = ATaRI peptide
EKKKNITLVRAGQTRCSQSSGVLRVQEGYLLRHMMVWVQVDQMFPSQFIGGGAREAATDTADPLPAQPLQLLTLEQVTPPEAS

SEQ ID NO: 1117 - protein, 22 aa, synthetic construct
  REGION 1..22: note = ATaRI peptide
GDFCMSLEGIPFSASNLEGYSC

SEQ ID NO: 1118 - protein, 10 aa, synthetic construct
  REGION 1..10: note = ATaRI peptide
QSQELDVQVR

SEQ ID NO: 1119 - protein, 21 aa, synthetic construct
  REGION 1..21: note = ATaRI peptide
DKTTNKCKGERTTVLGVGEHQ

SEQ ID NO: 1120 - protein, 123 aa, synthetic construct
  REGION 1..123: note = ATaRI peptide
GVQAQMAKVRVLPHVCSSKGFVVSTKVPVLRFPEGLRTMKLSGQGLSVVLSRQSMSTPGCWRKMYSKSMAGSSISSLPFTKLLAARKVRWPLPVLLLLPRVPYIIHPGPTSLPDSLWWFCNIL

SEQ ID NO: 1121 - protein, 40 aa, synthetic construct
  REGION 1..40: note = ATaRI peptide
CLLSSWDYRQVPPLPANFCIFSRDGVSPCCPGWPQTPDLK

SEQ ID NO: 1122 - protein, 9 aa, synthetic construct
  REGION 1..9: note = ATaRI peptide
AGPCSPDSS

SEQ ID NO: 1123 - protein, 9 aa, synthetic construct
  REGION 1..9: note = ATaRI peptide
YLSSLKGSR

SEQ ID NO: 1124 - protein, 9 aa, synthetic construct
  REGION 1..9: note = ATaRI peptide
WPRGPSTPK

SEQ ID NO: 1125 - protein, 15 aa, synthetic construct
  REGION 1..15: note = ATaRI peptide
YVTPRAFKVSVVNAF

SEQ ID NO: 1126 - protein, 9 aa, synthetic construct
  REGION 1..9: note = ATaRI peptide
YNLLLLRMW

SEQ ID NO: 1127 - protein, 9 aa, synthetic construct
  REGION 1..9: note = ATaRI peptide
EKLGAEDPW

SEQ ID NO: 1128 - protein, 12 aa, synthetic construct
  REGION 1..12: note = ATaRI peptide
KKFPPVKEVSFR

SEQ ID NO: 1129 - protein, 10 aa, synthetic construct
  REGION 1..10: note = ATaRI peptide
MSHEVVSEVI

SEQ ID NO: 1130 - protein, 35 aa, synthetic construct
  REGION 1..35: note = ATaRI peptide
VAEDERHRGKVLEVVLLCGWFLDDFICINFRPLLR

SEQ ID NO: 1131 - protein, 26 aa, synthetic construct
  REGION 1..26: note = ATaRI peptide
NPATSNQAGKNIFIILFLIFCRKLQY

SEQ ID NO: 1132 - protein, 14 aa, synthetic construct
  REGION 1..14: note = ATaRI peptide
SDQMDKEIGMSLYF

SEQ ID NO: 1133 - protein, 19 aa, synthetic construct
  REGION 1..19: note = ATaRI peptide
TAATLSNKCKTGLLKILSM

SEQ ID NO: 1134 - protein, 9 aa, synthetic construct
  REGION 1..9: note = ATaRI peptide
MGAIRNDQG

SEQ ID NO: 1135 - protein, 19 aa, synthetic construct
  REGION 1..19: note = ATaRI peptide
HSQSSSFTGMLIFLSIKKY

SEQ ID NO: 1136 - protein, 19 aa, synthetic construct
  REGION 1..19: note = ATaRI peptide
LKKTQPENGKCLETVILNS

SEQ ID NO: 1137 - protein, 9 aa, synthetic construct
  REGION 1..9: note = ATaRI peptide
MLIQTLDKG

SEQ ID NO: 1138 - protein, 9 aa, synthetic construct
  REGION 1..9: note = ATaRI peptide
EALAQRTYR

SEQ ID NO: 1139 - protein, 9 aa, synthetic construct
  REGION 1..9: note = ATaRI peptide
VLEHQVKYK

SEQ ID NO: 1140 - protein, 40 aa, synthetic construct
  REGION 1..40: note = ATaRI peptide
DYLHILKQVSFCFILFAQYIIQRSHGEVENMEKLKMRKYP

SEQ ID NO: 1141 - protein, 14 aa, synthetic construct
  REGION 1..14: note = ATaRI peptide
EEYNFENEVRIFFC

SEQ ID NO: 1142 - protein, 9 aa, synthetic construct
  REGION 1..9: note = ATaRI peptide
FSRFVKSLK

SEQ ID NO: 1143 - protein, 15 aa, synthetic construct
  REGION 1..15: note = ATaRI peptide
MSEVIANQGGNTCHI

SEQ ID NO: 1144 - protein, 37 aa, synthetic construct
  REGION 1..37: note = ATaRI peptide
LKTIHLKRVSLLVHAPSFSSHMWYYYLVLERCILCKI

SEQ ID NO: 1145 - protein, 21 aa, synthetic construct
  REGION 1..21: note = ATaRI peptide
LYGTEEYLVSHVSLIFSFKEA

SEQ ID NO: 1146 - protein, 9 aa, synthetic construct
  REGION 1..9: note = ATaRI peptide
MRKGIRWLM

SEQ ID NO: 1147 - protein, 9 aa, synthetic construct
  REGION 1..9: note = ATaRI peptide
EEQIHKFDK

SEQ ID NO: 1148 - protein, 70 aa, synthetic construct
  REGION 1..70: note = ATaRI peptide
ASTQVVPPGTGSVLLFPTSTLGLMALLPQLIYGLVLLPIHFVRSPGFMLLPLLLTIFPRRQLPQLLPHIP

SEQ ID NO: 1149 - protein, 15 aa, synthetic construct
  REGION 1..15: note = ATaRI peptide
TDKLKMTLVSTQNTI

SEQ ID NO: 1150 - protein, 13 aa, synthetic construct
  REGION 1..13: note = ATaRI peptide
KRCHREDQGTLPA

SEQ ID NO: 1151 - protein, 16 aa, synthetic construct
  REGION 1..16: note = ATaRI peptide
LREHEIGEVSYCSLLL

SEQ ID NO: 1152 - protein, 21 aa, synthetic construct
  REGION 1..21: note = ATaRI peptide
SIIEEEFVRWVGRMATDNTEL

SEQ ID NO: 1153 - protein, 60 aa, synthetic construct
  REGION 1..60: note = ATaRI peptide
LLDHLDGEVGGPLGVTELFLGILSPVLKGCFLTEQESSFDKLSRFIIVTFPFCREAGQVC

SEQ ID NO: 1154 - protein, 17 aa, synthetic construct
  REGION 1..17: note = ATaRI peptide
HDRLAQLAGNCFNFYSC

SEQ ID NO: 1155 - protein, 11 aa, synthetic construct
  REGION 1..11: note = ATaRI peptide
HRLLLLCLGKL

SEQ ID NO: 1156 - protein, 12 aa, synthetic construct
  REGION 1..12: note = ATaRI peptide
PSKVWQGQGMYF

SEQ ID NO: 1157 - protein, 16 aa, synthetic construct
  REGION 1..16: note = ATaRI peptide
LFDRLQCVVSSIYYSV

SEQ ID NO: 1158 - protein, 32 aa, synthetic construct
  REGION 1..32: note = ATaRI peptide
GSLPGCLRGEEGVCPGDGVGGSKVALPILALP

SEQ ID NO: 1159 - protein, 16 aa, synthetic construct
  REGION 1..16: note = ATaRI peptide
LHAYTLCQVKPLTFHL

SEQ ID NO: 1160 - protein, 40 aa, synthetic construct
  REGION 1..40: note = ATaRI peptide
KLSKLIILGKLKYCWNSDVYFKVLWLVGCLHHLVGCLHQN

SEQ ID NO: 1161 - protein, 25 aa, synthetic construct
  REGION 1..25: note = ATaRI peptide
QLIVDNATRYNITKSLHFLSVVLEI

SEQ ID NO: 1162 - protein, 17 aa, synthetic construct
  REGION 1..17: note = ATaRI peptide
ARTIHTFQVRGDFYQTF

SEQ ID NO: 1163 - protein, 23 aa, synthetic construct
  REGION 1..23: note = ATaRI peptide
ESPSKIFMVGVMFPCSQVLFKYR

SEQ ID NO: 1164 - protein, 9 aa, synthetic construct
  REGION 1..9: note = ATaRI peptide
DIMADMLSR

SEQ ID NO: 1165 - protein, 16 aa, synthetic construct
  REGION 1..16: note = ATaRI peptide
RLKGYLISGRYLDFLT

SEQ ID NO: 1166 - protein, 33 aa, synthetic construct
  REGION 1..33: note = ATaRI peptide
GFFGNLSMVCRKIGLRTPFGSSVVAHICNLSTP

SEQ ID NO: 1167 - protein, 9 aa, synthetic construct
  REGION 1..9: note = ATaRI peptide
WRLLASLYR

SEQ ID NO: 1168 - protein, 34 aa, synthetic construct
  REGION 1..34: note = ATaRI peptide
IRAGMTEEVSHVYPSCLISKSHRLFELEEIFVAA

SEQ ID NO: 1169 - protein, 10 aa, synthetic construct
  REGION 1..10: note = ATaRI peptide
SCWRMAEDVR

SEQ ID NO: 1170 - protein, 31 aa, synthetic construct
  REGION 1..31: note = ATaRI peptide
ELQATDKKVNVNRNMLGIWNRKQCYSIVHCS

SEQ ID NO: 1171 - protein, 22 aa, synthetic construct
  REGION 1..22: note = ATaRI peptide
EVLKTYIQVNFENLQPDCFLLF

SEQ ID NO: 1172 - protein, 10 aa, synthetic construct
  REGION 1..10: note = ATaRI peptide
LHQNPAHAGE

SEQ ID NO: 1173 - protein, 27 aa, synthetic construct
  REGION 1..27: note = ATaRI peptide
KSLQYLNLRYAPSPSPTLPLPLTRCSF

SEQ ID NO: 1174 - protein, 9 aa, synthetic construct
  REGION 1..9: note = ATaRI peptide
NRANGQSKG

SEQ ID NO: 1175 - protein, 22 aa, synthetic construct
  REGION 1..22: note = ATaRI peptide
QFEMQSRKSKQSSEAFIKICTF

SEQ ID NO: 1176 - protein, 22 aa, synthetic construct
  REGION 1..22: note = ATaRI peptide
RAVSDASAGLCISCINISYLCY

SEQ ID NO: 1177 - protein, 9 aa, synthetic construct
  REGION 1..9: note = ATaRI peptide
SKSYGSGSR

SEQ ID NO: 1178 - protein, 33 aa, synthetic construct
  REGION 1..33: note = ATaRI peptide
APKKTKTEVGNPCRHPDPSCDHSFLRLAYAHYS

SEQ ID NO: 1179 - protein, 27 aa, synthetic construct
  REGION 1..27: note = ATaRI peptide
FIDPNERPVSSINLCKYKIDFLVNVNM

SEQ ID NO: 1180 - protein, 29 aa, synthetic construct
  REGION 1..29: note = ATaRI peptide
GAYKHETECKCHAFIILKNNVFCNSERVV

SEQ ID NO: 1181 - protein, 45 aa, synthetic construct
  REGION 1..45: note = ATaRI peptide
VERLALVTGMEKRYCFLTNTIVTLEFVICYYMQLPLRSLEFQQLF

SEQ ID NO: 1182 - protein, 19 aa, synthetic construct
  REGION 1..19: note = ATaRI peptide
DNIIKAAPRYPNTFLRKNY

SEQ ID NO: 1183 - protein, 19 aa, synthetic construct
  REGION 1..19: note = ATaRI peptide
CLTFSKSEVIFFHFSRNSL

SEQ ID NO: 1184 - protein, 24 aa, synthetic construct
  REGION 1..24: note = ATaRI peptide
FAAYYVATGKAHPSACALLTQLKD

SEQ ID NO: 1185 - protein, 14 aa, synthetic construct
  REGION 1..14: note = ATaRI peptide
ELFLDLCKSRYIQI

SEQ ID NO: 1186 - protein, 37 aa, synthetic construct
  REGION 1..37: note = ATaRI peptide
EPAYGLIQVCSLNLSCIILTALFYIPCTSHLLREYAK

SEQ ID NO: 1187 - protein, 12 aa, synthetic construct
  REGION 1..12: note = ATaRI peptide
PGFEVITRVSKD

SEQ ID NO: 1188 - protein, 24 aa, synthetic construct
  REGION 1..24: note = ATaRI peptide
SLQMVKCKVYSVSSNCKICLFLVG

SEQ ID NO: 1189 - protein, 10 aa, synthetic construct
  REGION 1..10: note = ATaRI peptide
LTSATYDKVR

SEQ ID NO: 1190 - protein, 23 aa, synthetic construct
  REGION 1..23: note = ATaRI peptide
AYLIAKGQVKKISVVWILIRCSS

SEQ ID NO: 1191 - protein, 9 aa, synthetic construct
  REGION 1..9: note = ATaRI peptide
WATVQFLSK

SEQ ID NO: 1192 - protein, 47 aa, synthetic construct
  REGION 1..47: note = ATaRI peptide
TRMLALVGRWECFYNLGLGLGFNSLFREKGFVSSCNLFSLLWFVSEM

SEQ ID NO: 1193 - protein, 15 aa, synthetic construct
  REGION 1..15: note = ATaRI peptide
RPRDDPGKVRYYCKH

SEQ ID NO: 1194 - protein, 28 aa, synthetic construct
  REGION 1..28: note = ATaRI peptide
KSSSSSQHGESGVGMGAGRLFYLVEQVG

SEQ ID NO: 1195 - protein, 11 aa, synthetic construct
  REGION 1..11: note = ATaRI peptide
DSAGYNRPGKS

SEQ ID NO: 1196 - protein, 18 aa, synthetic construct
  REGION 1..18: note = ATaRI peptide
ADYYGIKQVRVFPYVFRC

SEQ ID NO: 1197 - protein, 48 aa, synthetic construct
  REGION 1..48: note = ATaRI peptide
EEFENQHKGTSSPCVIIFIHLSIMKYAISIFYFSPFFRHYHDLDQHLR

SEQ ID NO: 1198 - protein, 16 aa, synthetic construct
  REGION 1..16: note = ATaRI peptide
NARMSACLVWLYFFLE

SEQ ID NO: 1199 - protein, 9 aa, synthetic construct
  REGION 1..9: note = ATaRI peptide
CIRQNKDER

SEQ ID NO: 1200 - protein, 54 aa, synthetic construct
  REGION 1..54: note = ATaRI peptide
QQPSISVLCTYLGKWTDRLMILLIGFFSFLLFCTGFLVLNYESYYYTKFEMVVV

SEQ ID NO: 1201 - protein, 16 aa, synthetic construct
  REGION 1..16: note = ATaRI peptide
PLPDTFSYGEPTKEHT

SEQ ID NO: 1202 - protein, 24 aa, synthetic construct
  REGION 1..24: note = ATaRI peptide
SKGPDNSISTCLTFDFFLIVLKLD

SEQ ID NO: 1203 - protein, 14 aa, synthetic construct
  REGION 1..14: note = ATaRI peptide
TLFMSALKVKCCSE

SEQ ID NO: 1204 - protein, 117 aa, synthetic construct
  REGION 1..117: note = ATaRI peptide
PSQTLISSGKLSFLMSLFSQNSCEIFLFFFFCLFFFAFLFFPRFCWSLNSGRNGNNISLEHISSGSGGQVTDTDFICFYQAVVSLQVPLSAFLGCEFFSFITLSIHSSHLTELLTVF

SEQ ID NO: 1205 - protein, 53 aa, synthetic construct
  REGION 1..53: note = ATaRI peptide
VFKMGRFQVRQSLCVALIPSFGGVVYIIKLLPTYLGHNCQSSDFCHIVLYSSF

SEQ ID NO: 1206 - protein, 28 aa, synthetic construct
  REGION 1..28: note = ATaRI peptide
LKIAVLQKVVIYLFTFYRKKNLAIKKIV

SEQ ID NO: 1207 - protein, 14 aa, synthetic construct
  REGION 1..14: note = ATaRI peptide
IFPATTWIRYFLDS

SEQ ID NO: 1208 - protein, 23 aa, synthetic construct
  REGION 1..23: note = ATaRI peptide
KDDLLHKLVSGHFFLPLFRVLGY

SEQ ID NO: 1209 - protein, 31 aa, synthetic construct
  REGION 1..31: note = ATaRI peptide
KDPIPEEQVRVKITVLSLVGFLFLMSFKITT

SEQ ID NO: 1210 - protein, 42 aa, synthetic construct
  REGION 1..42: note = ATaRI peptide
KKSKGPSAGKESFMFSQSPPGTAELFGSGPLRGPGPGPQSPD

SEQ ID NO: 1211 - protein, 18 aa, synthetic construct
  REGION 1..18: note = ATaRI peptide
CSLDFPGSGDPPTSQLSK

SEQ ID NO: 1212 - protein, 20 aa, synthetic construct
  REGION 1..20: note = ATaRI peptide
MPRNGSRLGNLITCLLCLPF

SEQ ID NO: 1213 - protein, 22 aa, synthetic construct
  REGION 1..22: note = ATaRI peptide
KRVHRSLKVSNLKKIFMKKWIS

SEQ ID NO: 1214 - protein, 32 aa, synthetic construct
  REGION 1..32: note = ATaRI peptide
TVAVQEKAGKCCLYIVGGLVCFFFVFLFLACI

SEQ ID NO: 1215 - protein, 20 aa, synthetic construct
  REGION 1..20: note = ATaRI peptide
DMFSPIRDGKSVQRILFSCW

SEQ ID NO: 1216 - protein, 19 aa, synthetic construct
  REGION 1..19: note = ATaRI peptide
KKPLTRAEVNEYNLDRCYH

SEQ ID NO: 1217 - protein, 79 aa, synthetic construct
  REGION 1..79: note = ATaRI peptide
EASTPTGIRYSDTFKQVLVYSSRESLFLILHHKVTVLLLRIKLFFWSQVQWYMPVVPATQETKAGGLLKPRSSRPVWAT

SEQ ID NO: 1218 - protein, 24 aa, synthetic construct
  REGION 1..24: note = ATaRI peptide
ILMLRKHPRYRWSNLVGVSGPMSQ

SEQ ID NO: 1219 - protein, 19 aa, synthetic construct
  REGION 1..19: note = ATaRI peptide
HSIIKECKGMVIYLFMRRL

SEQ ID NO: 1220 - protein, 40 aa, synthetic construct
  REGION 1..40: note = ATaRI peptide
EKNCSQLQVLASWFTFFFPFSFEIILDLLKIYKIVDSFCA

SEQ ID NO: 1221 - protein, 13 aa, synthetic construct
  REGION 1..13: note = ATaRI peptide
CGADKTLQVKHIS

SEQ ID NO: 1222 - protein, 17 aa, synthetic construct
  REGION 1..17: note = ATaRI peptide
CSVDKKVKVGKSFPLEL

SEQ ID NO: 1223 - protein, 20 aa, synthetic construct
  REGION 1..20: note = ATaRI peptide
SSDDQTIRVRNIEIFILNIS

SEQ ID NO: 1224 - protein, 12 aa, synthetic construct
  REGION 1..12: note = ATaRI peptide
VDHIRRLQVSIF

SEQ ID NO: 1225 - protein, 29 aa, synthetic construct
  REGION 1..29: note = ATaRI peptide
TSADKTAKVGQSIETMHKTLVVVMYNEFK

SEQ ID NO: 1226 - protein, 17 aa, synthetic construct
  REGION 1..17: note = ATaRI peptide
ARAPSPRTGNISYSQLA

SEQ ID NO: 1227 - protein, 100 aa, synthetic construct
  REGION 1..100: note = ATaRI peptide
ERGAADPEGEEQRGLAGPGFTGLLAVPPLGGWRRESAGWVRLPPRPGSASATPLAFLPPGVRVAAGSGGIPRCSCSSRGSCGAERPRAEAVGCPHALRGG

SEQ ID NO: 1228 - protein, 11 aa, synthetic construct
  REGION 1..11: note = ATaRI peptide
VGYDPNEKVSI

SEQ ID NO: 1229 - protein, 13 aa, synthetic construct
  REGION 1..13: note = ATaRI peptide
AVRIAREIGKSLN

SEQ ID NO: 1230 - protein, 35 aa, synthetic construct
  REGION 1..35: note = ATaRI peptide
NPRHIEIQVGTFKMLFHYYFKIISFNPIGIIFSSI

SEQ ID NO: 1231 - protein, 10 aa, synthetic construct
  REGION 1..10: note = ATaRI peptide
VECRVYAEVK

SEQ ID NO: 1232 - protein, 17 aa, synthetic construct
  REGION 1..17: note = ATaRI peptide
YYDPMISKVSLISQWII

SEQ ID NO: 1233 - protein, 11 aa, synthetic construct
  REGION 1..11: note = ATaRI peptide
MTAGKTGTVSP

SEQ ID NO: 1234 - protein, 42 aa, synthetic construct
  REGION 1..42: note = ATaRI peptide
KALKERIQVMYNLVPMSCILLTCLLPQILFLLKKKKYFIKSH

SEQ ID NO: 1235 - protein, 46 aa, synthetic construct
  REGION 1..46: note = ATaRI peptide
VANNGSSQVGASRFHLNITLEPYSHRVSTELIDCFSTSFLFSQIFF

SEQ ID NO: 1236 - protein, 21 aa, synthetic construct
  REGION 1..21: note = ATaRI peptide
TGTGLIRAVSVCELLIQKIND

SEQ ID NO: 1237 - protein, 9 aa, synthetic construct
  REGION 1..9: note = ATaRI peptide
YTWSSRGPR

SEQ ID NO: 1238 - protein, 31 aa, synthetic construct
  REGION 1..31: note = ATaRI peptide
GGIALILSGKRVLYCPYIIADQYFCFLKLSW

SEQ ID NO: 1239 - protein, 10 aa, synthetic construct
  REGION 1..10: note = ATaRI peptide
EPVFPENTGQ

SEQ ID NO: 1240 - protein, 26 aa, synthetic construct
  REGION 1..26: note = ATaRI peptide
REGLHYTEVLMYLHFYFLHSLKCLKG

SEQ ID NO: 1241 - protein, 9 aa, synthetic construct
  REGION 1..9: note = ATaRI peptide
PITAVIAAK

SEQ ID NO: 1242 - protein, 10 aa, synthetic construct
  REGION 1..10: note = ATaRI peptide
VPEGATWAGR

SEQ ID NO: 1243 - protein, 9 aa, synthetic construct
  REGION 1..9: note = ATaRI peptide
SGDAYPHQV

SEQ ID NO: 1244 - protein, 20 aa, synthetic construct
  REGION 1..20: note = ATaRI peptide
KTELGKKAVSISFLNTEITY

SEQ ID NO: 1245 - protein, 33 aa, synthetic construct
  REGION 1..33: note = ATaRI peptide
WTDLFDNKVTFLLLVSAKFLGLPHRPLLCPIAG

SEQ ID NO: 1246 - protein, 12 aa, synthetic construct
  REGION 1..12: note = ATaRI peptide
ENWKNCIQVSDI

SEQ ID NO: 1247 - protein, 11 aa, synthetic construct
  REGION 1..11: note = ATaRI peptide
PNNSCYSAGKY

SEQ ID NO: 1248 - protein, 9 aa, synthetic construct
  REGION 1..9: note = ATaRI peptide
IGVVGGCQE

SEQ ID NO: 1249 - protein, 9 aa, synthetic construct
  REGION 1..9: note = ATaRI peptide
LAGPQKTNG

SEQ ID NO: 1250 - protein, 30 aa, synthetic construct
  REGION 1..30: note = ATaRI peptide
KELERHMEVLRFHSLTWSPYQGLVAWSDLL

SEQ ID NO: 1251 - protein, 41 aa, synthetic construct
  REGION 1..41: note = ATaRI peptide
HRNAFEISGDRHKLCECCVSGRRGSLSPRADSCLRISEGGV

SEQ ID NO: 1252 - protein, 23 aa, synthetic construct
  REGION 1..23: note = ATaRI peptide
FLIIFLVQVRPVIVFHLITYKSK

SEQ ID NO: 1253 - protein, 9 aa, synthetic construct
  REGION 1..9: note = ATaRI peptide
EQPQPDLYK

SEQ ID NO: 1254 - protein, 9 aa, synthetic construct
  REGION 1..9: note = ATaRI peptide
SQKRSAVEK

SEQ ID NO: 1255 - protein, 16 aa, synthetic construct
  REGION 1..16: note = ATaRI peptide
ESERQRNLVWRITALV

SEQ ID NO: 1256 - protein, 20 aa, synthetic construct
  REGION 1..20: note = ATaRI peptide
SSPSVNGRVGGSPHAVQVCE

SEQ ID NO: 1257 - protein, 20 aa, synthetic construct
  REGION 1..20: note = ATaRI peptide
VALVEGVQRYVAGQGSAWVS

SEQ ID NO: 1258 - protein, 56 aa, synthetic construct
  REGION 1..56: note = ATaRI peptide
KKRFAYLSGEFQKLGWGGEGGVWGRVWAEQPPWPGPGWSWEGSCEGLCIHCLGSDL

SEQ ID NO: 1259 - protein, 138 aa, synthetic construct
  REGION 1..138: note = ATaRI peptide
DDFKMKVPVSAPRLHPAVAERNSLPSWPICDHRNPRGADFRATRSTKPRRTWREVAPPQCCQKQYNPFFPHPRPQPPPRQRCTEHQPQRGHRVGIPSGRGSRDIHTPRRTTELETLRAESPPGPPARNSAQALPAPQG

SEQ ID NO: 1260 - protein, 73 aa, synthetic construct
  REGION 1..73: note = ATaRI peptide
EESLAILRRWVRCPSVLTGALRPQPEPPDAVRHSSRCLTDRRLVQKSLWFLLLHQPIPRGPAVARACVLVPTA

SEQ ID NO: 1261 - protein, 55 aa, synthetic construct
  REGION 1..55: note = ATaRI peptide
LIAITGYDVRRPDARSSPPPPWNTPAQQLGGLPAHAPRFGVNVQVLGRRSGVVPR

SEQ ID NO: 1262 - protein, 27 aa, synthetic construct
  REGION 1..27: note = ATaRI peptide
LGMLSDLQVSAACAEDTWVPAQLLAPE

SEQ ID NO: 1263 - protein, 10 aa, synthetic construct
  REGION 1..10: note = ATaRI peptide
QRLMQEREVR

SEQ ID NO: 1264 - protein, 17 aa, synthetic construct
  REGION 1..17: note = ATaRI peptide
HLTAILQKGRFPNSCAN

SEQ ID NO: 1265 - protein, 13 aa, synthetic construct
  REGION 1..13: note = ATaRI peptide
DIMVHFKQVSCVS

SEQ ID NO: 1266 - protein, 50 aa, synthetic construct
  REGION 1..50: note = ATaRI peptide
VLKAEFKEVSCLFHLFFIICKYVNIIFLLLLDFSSKKGVFHFNSLAFISQ

SEQ ID NO: 1267 - protein, 55 aa, synthetic construct
  REGION 1..55: note = ATaRI peptide
RADHHFIKVVSHGGDACLPPIPGSWCQYDRALSSEQGTAFLLAEILLEFRTLSVI

SEQ ID NO: 1268 - protein, 27 aa, synthetic construct
  REGION 1..27: note = ATaRI peptide
RAGVISREVSGFPPRSASRAARAALWV

SEQ ID NO: 1269 - protein, 18 aa, synthetic construct
  REGION 1..18: note = ATaRI peptide
QLQELILQVREYVSVEAG

SEQ ID NO: 1270 - protein, 9 aa, synthetic construct
  REGION 1..9: note = ATaRI peptide
SNGTRFSAR

SEQ ID NO: 1271 - protein, 106 aa, synthetic construct
  REGION 1..106: note = ATaRI peptide
PWACWTPQVSAGLGARLGSCGGAWGPRGWDYRSPAGPGGTCAETRHGVWSLRLLRALSLEHFAFRTGVGRSSYRFVHSFSLPVSLSVSVSVSLALSVSASSVFAFL

SEQ ID NO: 1272 - protein, 52 aa, synthetic construct
  REGION 1..52: note = ATaRI peptide
GVFAAQHIVSTLSLCAQSLSGAERVDVKKVQFHFADLSSDGFTVSLHAGGCQ

SEQ ID NO: 1273 - protein, 32 aa, synthetic construct
  REGION 1..32: note = ATaRI peptide
RVRQYLDQVGGPDSGCGAQASPGLFPRGVGLG

SEQ ID NO: 1274 - protein, 25 aa, synthetic construct
  REGION 1..25: note = ATaRI peptide
LFENKLKKVSKTKELALALCKYLIP

SEQ ID NO: 1275 - protein, 9 aa, synthetic construct
  REGION 1..9: note = ATaRI peptide
GSLEEPQET

SEQ ID NO: 1276 - protein, 28 aa, synthetic construct
  REGION 1..28: note = ATaRI peptide
RKERLANKVFIKPKKKNVSGCLKVQAAC

SEQ ID NO: 1277 - protein, 20 aa, synthetic construct
  REGION 1..20: note = ATaRI peptide
KAVRKDIQVLCFVSYLFLHT

SEQ ID NO: 1278 - protein, 13 aa, synthetic construct
  REGION 1..13: note = ATaRI peptide
RKEPKGLKSECKY

SEQ ID NO: 1279 - protein, 27 aa, synthetic construct
  REGION 1..27: note = ATaRI peptide
ALIHAAEKVCGFLCISFRAFMVFLPMD

SEQ ID NO: 1280 - protein, 9 aa, synthetic construct
  REGION 1..9: note = ATaRI peptide
DLLKNHLET

SEQ ID NO: 1281 - protein, 29 aa, synthetic construct
  REGION 1..29: note = ATaRI peptide
KPPQNIPEGKPMPPFTLFYVKCDTILTDF

SEQ ID NO: 1282 - protein, 28 aa, synthetic construct
  REGION 1..28: note = ATaRI peptide
TICGKLTEVCIFFLYHLILTNRNILNFI

SEQ ID NO: 1283 - protein, 17 aa, synthetic construct
  REGION 1..17: note = ATaRI peptide
VKRPFCSEGKLHIQCCS

SEQ ID NO: 1284 - protein, 10 aa, synthetic construct
  REGION 1..10: note = ATaRI peptide
KGPENLHYGM

SEQ ID NO: 1285 - protein, 12 aa, synthetic construct
  REGION 1..12: note = ATaRI peptide
KTETTNINSELH

SEQ ID NO: 1286 - protein, 18 aa, synthetic construct
  REGION 1..18: note = ATaRI peptide
DIEIDFPRGTQNLYDYGI

SEQ ID NO: 1287 - protein, 45 aa, synthetic construct
  REGION 1..45: note = ATaRI peptide
WQPSILPDGNAIFTKGVALLILGLLFLQSMFENIIIKSLKLDNIF

SEQ ID NO: 1288 - protein, 9 aa, synthetic construct
  REGION 1..9: note = ATaRI peptide
MFECYLSKR

SEQ ID NO: 1289 - protein, 13 aa, synthetic construct
  REGION 1..13: note = ATaRI peptide
INLDLTYSVSIEI

SEQ ID NO: 1290 - protein, 9 aa, synthetic construct
  REGION 1..9: note = ATaRI peptide
VPSVNKQMR

SEQ ID NO: 1291 - protein, 10 aa, synthetic construct
  REGION 1..10: note = ATaRI peptide
CTEALYNIGK

SEQ ID NO: 1292 - protein, 13 aa, synthetic construct
  REGION 1..13: note = ATaRI peptide
QAFQYYYEVGVLS

SEQ ID NO: 1293 - protein, 71 aa, synthetic construct
  REGION 1..71: note = ATaRI peptide
SPSERERLGNRTFSPSWAGFTPTPTPAKLPWCPHPVSSLWLPSQWGWREALNLAARRRRPLAAVPGPSAAW

SEQ ID NO: 1294 - protein, 9 aa, synthetic construct
  REGION 1..9: note = ATaRI peptide
QHEYAAPAE

SEQ ID NO: 1295 - protein, 20 aa, synthetic construct
  REGION 1..20: note = ATaRI peptide
QSIHENVKVSFHYPFIYLDM

SEQ ID NO: 1296 - protein, 10 aa, synthetic construct
  REGION 1..10: note = ATaRI peptide
DYAEHDLWVR

SEQ ID NO: 1297 - protein, 9 aa, synthetic construct
  REGION 1..9: note = ATaRI peptide
LEDPLPTSE

SEQ ID NO: 1298 - protein, 26 aa, synthetic construct
  REGION 1..26: note = ATaRI peptide
LIMTSDYQVFQVYFVLTACQCLHMGL

SEQ ID NO: 1299 - protein, 9 aa, synthetic construct
  REGION 1..9: note = ATaRI peptide
QHTNEPLFK

SEQ ID NO: 1300 - protein, 12 aa, synthetic construct
  REGION 1..12: note = ATaRI peptide
KRHAKAHEGVYG

SEQ ID NO: 1301 - protein, 12 aa, synthetic construct
  REGION 1..12: note = ATaRI peptide
ETKYPLMQVSLV

SEQ ID NO: 1302 - protein, 32 aa, synthetic construct
  REGION 1..32: note = ATaRI peptide
AYFTKRKWGKKKMQANYILTNAFALWKSSFLF

SEQ ID NO: 1303 - protein, 74 aa, synthetic construct
  REGION 1..74: note = ATaRI peptide
VIEEDLAKVKSVNFFFFFFFLRQSLALSPRLECSGAISAYCNLCLLGSSESPASASQVAGITGVRHHTPLFLYC

SEQ ID NO: 1304 - protein, 14 aa, synthetic construct
  REGION 1..14: note = ATaRI peptide
ESHDLLRKGYMGEL

SEQ ID NO: 1305 - protein, 16 aa, synthetic construct
  REGION 1..16: note = ATaRI peptide
ITWILDADGKCLEVFF

SEQ ID NO: 1306 - protein, 20 aa, synthetic construct
  REGION 1..20: note = ATaRI peptide
KKEVKQSQVLIPMIKSFPPF

SEQ ID NO: 1307 - protein, 10 aa, synthetic construct
  REGION 1..10: note = ATaRI peptide
GISRKNDIGK

SEQ ID NO: 1308 - protein, 9 aa, synthetic construct
  REGION 1..9: note = ATaRI peptide
ALSIPLVNK

SEQ ID NO: 1309 - protein, 15 aa, synthetic construct
  REGION 1..15: note = ATaRI peptide
FTIDLKHEVCHVLFD

SEQ ID NO: 1310 - protein, 20 aa, synthetic construct
  REGION 1..20: note = ATaRI peptide
THSPLFHQVRKWFLFFPHGR

SEQ ID NO: 1311 - protein, 24 aa, synthetic construct
  REGION 1..24: note = ATaRI peptide
RIIMAEPLVSTCRGNCLFENSSVC

SEQ ID NO: 1312 - protein, 16 aa, synthetic construct
  REGION 1..16: note = ATaRI peptide
GEDPQFDQVCDIYVIY

SEQ ID NO: 1313 - protein, 14 aa, synthetic construct
  REGION 1..14: note = ATaRI peptide
PRTSNKSKRYISFV

SEQ ID NO: 1314 - protein, 9 aa, synthetic construct
  REGION 1..9: note = ATaRI peptide
VIGVLAQAK

SEQ ID NO: 1315 - protein, 11 aa, synthetic construct
  REGION 1..11: note = ATaRI peptide
EASLQFMQVMS

SEQ ID NO: 1316 - protein, 32 aa, synthetic construct
  REGION 1..32: note = ATaRI peptide
SSRKKHSLVSNYEKIENTNKTAQTKIPRQESV

SEQ ID NO: 1317 - protein, 49 aa, synthetic construct
  REGION 1..49: note = ATaRI peptide
NNCLSNLKVSICQLKNDLFKKFTVVFRLADVLLEVTPDVCQGNCPILVE

SEQ ID NO: 1318 - protein, 19 aa, synthetic construct
  REGION 1..19: note = ATaRI peptide
KIIQFIAQVMEKIPVVGIF

SEQ ID NO: 1319 - protein, 9 aa, synthetic construct
  REGION 1..9: note = ATaRI peptide
KAFSLNPEV

SEQ ID NO: 1320 - protein, 9 aa, synthetic construct
  REGION 1..9: note = ATaRI peptide
NKEPEDMIT

SEQ ID NO: 1321 - protein, 9 aa, synthetic construct
  REGION 1..9: note = ATaRI peptide
LELIDLLAR

SEQ ID NO: 1322 - protein, 24 aa, synthetic construct
  REGION 1..24: note = ATaRI peptide
FIALGQPEVWISLLNFSISYFQLF

SEQ ID NO: 1323 - protein, 19 aa, synthetic construct
  REGION 1..19: note = ATaRI peptide
IHVAVSDSVSTHLIPINGS

SEQ ID NO: 1324 - protein, 10 aa, synthetic construct
  REGION 1..10: note = ATaRI peptide
GTVSYDNKVT

SEQ ID NO: 1325 - protein, 17 aa, synthetic construct
  REGION 1..17: note = ATaRI peptide
GRTNSLVFRYSSLNELF

SEQ ID NO: 1326 - protein, 11 aa, synthetic construct
  REGION 1..11: note = ATaRI peptide
EALERRPEVRI

SEQ ID NO: 1327 - protein, 58 aa, synthetic construct
  REGION 1..58: note = ATaRI peptide
ANLIQCVPGTVIRYKKLPFMLGSPFVFFITVLSSLTLLAFMQVWDGEVYLLRDTRTYI

SEQ ID NO: 1328 - protein, 29 aa, synthetic construct
  REGION 1..29: note = ATaRI peptide
ILACQDLRVSIGKNTLFLNVFCVLPQLSY

SEQ ID NO: 1329 - protein, 13 aa, synthetic construct
  REGION 1..13: note = ATaRI peptide
AIATVCGSRYEFL

SEQ ID NO: 1330 - protein, 12 aa, synthetic construct
  REGION 1..12: note = ATaRI peptide
ELTLPLFSGTRQ

SEQ ID NO: 1331 - protein, 27 aa, synthetic construct
  REGION 1..27: note = ATaRI peptide
SKASAAASGKKSNRADTWSQIPGVSFM

SEQ ID NO: 1332 - protein, 43 aa, synthetic construct
  REGION 1..43: note = ATaRI peptide
KILKESDERLVHKFDLISSVMFCNNLYIDINTGLWSFINFTRT

SEQ ID NO: 1333 - protein, 28 aa, synthetic construct
  REGION 1..28: note = ATaRI peptide
GGSYDEDKSKYQQAVGFQTERKWSEDGK

SEQ ID NO: 1334 - protein, 25 aa, synthetic construct
  REGION 1..25: note = ATaRI peptide
YQPEYLYTGNREGLVESLGQLQMQR

SEQ ID NO: 1335 - protein, 9 aa, synthetic construct
  REGION 1..9: note = ATaRI peptide
KLIEFLTTR

SEQ ID NO: 1336 - protein, 30 aa, synthetic construct
  REGION 1..30: note = ATaRI peptide
SVFKDSKSGTSSYLHRSLFQHCSVMDTVSI

SEQ ID NO: 1337 - protein, 56 aa, synthetic construct
  REGION 1..56: note = ATaRI peptide
NMVTYLAEVSFFFLFFETGSHYVAQADLNSWAQAVLLPSPPRVLGLQAWATIPCQR

SEQ ID NO: 1338 - protein, 21 aa, synthetic construct
  REGION 1..21: note = ATaRI peptide
KTIEKYVQVSTWITSLSNQSF

SEQ ID NO: 1339 - protein, 19 aa, synthetic construct
  REGION 1..19: note = ATaRI peptide
DFHFDISEVLSYVNYFCEL

SEQ ID NO: 1340 - protein, 24 aa, synthetic construct
  REGION 1..24: note = ATaRI peptide
WKRPQYSQVCNPRPTVLGGSLGTC

SEQ ID NO: 1341 - protein, 24 aa, synthetic construct
  REGION 1..24: note = ATaRI peptide
DVELEDGEVRCILCKNNPRTLFLD

SEQ ID NO: 1342 - protein, 12 aa, synthetic construct
  REGION 1..12: note = ATaRI peptide
LQISEGSKVKRF

SEQ ID NO: 1343 - protein, 9 aa, synthetic construct
  REGION 1..9: note = ATaRI peptide
ALDQFTLAR

SEQ ID NO: 1344 - protein, 50 aa, synthetic construct
  REGION 1..50: note = ATaRI peptide
HVFSSLFKVCVLTESAEDLVSKGSRVTLNLRRGCSSVLGLYYCIFSSRHP

SEQ ID NO: 1345 - protein, 23 aa, synthetic construct
  REGION 1..23: note = ATaRI peptide
NRKEATLSVSFCVSMHMQSVKTK

SEQ ID NO: 1346 - protein, 34 aa, synthetic construct
  REGION 1..34: note = ATaRI peptide
HEVSSMPEVSPHASQPHVPPQKPFLLFFLTPPLL

SEQ ID NO: 1347 - protein, 10 aa, synthetic construct
  REGION 1..10: note = ATaRI peptide
LDKFKLDLGK

SEQ ID NO: 1348 - protein, 21 aa, synthetic construct
  REGION 1..21: note = ATaRI peptide
TLSSTVLIGNNSKCVFTRKSR

SEQ ID NO: 1349 - protein, 15 aa, synthetic construct
  REGION 1..15: note = ATaRI peptide
VFPHDTTAVSKYDID

SEQ ID NO: 1350 - protein, 16 aa, synthetic construct
  REGION 1..16: note = ATaRI peptide
LTFANADSGTSVFFFL

SEQ ID NO: 1351 - protein, 28 aa, synthetic construct
  REGION 1..28: note = ATaRI peptide
RGEPLILVGKCSFLPFVLPITIFKVFIQ

SEQ ID NO: 1352 - protein, 9 aa, synthetic construct
  REGION 1..9: note = ATaRI peptide
EPITCVPFR

SEQ ID NO: 1353 - protein, 10 aa, synthetic construct
  REGION 1..10: note = ATaRI peptide
APESLMLKVN

SEQ ID NO: 1354 - protein, 26 aa, synthetic construct
  REGION 1..26: note = ATaRI peptide
QEEFEEHEGKISYMVHIVISNMRTKS

SEQ ID NO: 1355 - protein, 13 aa, synthetic construct
  REGION 1..13: note = ATaRI peptide
RERTLDKRVSMNK

SEQ ID NO: 1356 - protein, 9 aa, synthetic construct
  REGION 1..9: note = ATaRI peptide
YYQNSIDDR

SEQ ID NO: 1357 - protein, 66 aa, synthetic construct
  REGION 1..66: note = ATaRI peptide
LDLIKQPKVSKNFFLQCFLKHMYFNYYLPLLLCVKQFFLFAKVLIVEVRIPCLENSEFLRNLLDRK

SEQ ID NO: 1358 - protein, 12 aa, synthetic construct
  REGION 1..12: note = ATaRI peptide
FSKVMVITSKLF

SEQ ID NO: 1359 - protein, 17 aa, synthetic construct
  REGION 1..17: note = ATaRI peptide
RAGLELLKVSIYLKLSA

SEQ ID NO: 1360 - protein, 21 aa, synthetic construct
  REGION 1..21: note = ATaRI peptide
TQFAQIFEVMRKKFSCLFHMS

SEQ ID NO: 1361 - protein, 40 aa, synthetic construct
  REGION 1..40: note = ATaRI peptide
DLTEQGKIRYAITISQFFGLHNISALGVTVQWCCFFFFFF

SEQ ID NO: 1362 - protein, 27 aa, synthetic construct
  REGION 1..27: note = ATaRI peptide
LKQHAAVSGKHIRKWKGYFFSLLVSVL

SEQ ID NO: 1363 - protein, 9 aa, synthetic construct
  REGION 1..9: note = ATaRI peptide
IEQLKDVKE

SEQ ID NO: 1364 - protein, 18 aa, synthetic construct
  REGION 1..18: note = ATaRI peptide
RFFTQPDKVVTLQFVCVS

SEQ ID NO: 1365 - protein, 20 aa, synthetic construct
  REGION 1..20: note = ATaRI peptide
EEEVSTVNVCVQSFCEWCGI

SEQ ID NO: 1366 - protein, 37 aa, synthetic construct
  REGION 1..37: note = ATaRI peptide
IVSQQTPQRYQYKMMTVKLSLSGYHRTHINYFMLMSF

SEQ ID NO: 1367 - protein, 9 aa, synthetic construct
  REGION 1..9: note = ATaRI peptide
DKDKPYLYW

SEQ ID NO: 1368 - protein, 29 aa, synthetic construct
  REGION 1..29: note = ATaRI peptide
KYDFQPRKVGKSKYFYNSPVMTEFLTLLL

SEQ ID NO: 1369 - protein, 15 aa, synthetic construct
  REGION 1..15: note = ATaRI peptide
HQLGPGYKVVITVIL

SEQ ID NO: 1370 - protein, 26 aa, synthetic construct
  REGION 1..26: note = ATaRI peptide
SGITPKGLGMYTTSTVFTFAYDYSVF

SEQ ID NO: 1371 - protein, 20 aa, synthetic construct
  REGION 1..20: note = ATaRI peptide
AFDQRNGIRYDYNISITIRL

SEQ ID NO: 1372 - protein, 20 aa, synthetic construct
  REGION 1..20: note = ATaRI peptide
LSAATSPTVSTLPPSSGYIL

SEQ ID NO: 1373 - protein, 37 aa, synthetic construct
  REGION 1..37: note = ATaRI peptide
LMHVQGSKVSITFVVIFSFQFQVLFLLIYEIFDLVIF

SEQ ID NO: 1374 - protein, 26 aa, synthetic construct
  REGION 1..26: note = ATaRI peptide
VTATAASKVSKLFFLAKYNLPEKNLF

SEQ ID NO: 1375 - protein, 12 aa, synthetic construct
  REGION 1..12: note = ATaRI peptide
RAVVFRDVVSYT

SEQ ID NO: 1376 - protein, 16 aa, synthetic construct
  REGION 1..16: note = ATaRI peptide
LMFLNTIAGKMSHSLI

SEQ ID NO: 1377 - protein, 14 aa, synthetic construct
  REGION 1..14: note = ATaRI peptide
QRDTSDVKVGSFIC

SEQ ID NO: 1378 - protein, 21 aa, synthetic construct
  REGION 1..21: note = ATaRI peptide
GLVISGAKGQKSFLSFSMSRR

SEQ ID NO: 1379 - protein, 13 aa, synthetic construct
  REGION 1..13: note = ATaRI peptide
QVLNQKRLVNICL

SEQ ID NO: 1380 - protein, 29 aa, synthetic construct
  REGION 1..29: note = ATaRI peptide
DAPDKGYVGKLNGFVILIQILLTHLIIFS

SEQ ID NO: 1381 - protein, 9 aa, synthetic construct
  REGION 1..9: note = ATaRI peptide
FEDSVRDSR

SEQ ID NO: 1382 - protein, 18 aa, synthetic construct
  REGION 1..18: note = ATaRI peptide
LLKHVTTQGGSTNCIANA

SEQ ID NO: 1383 - protein, 9 aa, synthetic construct
  REGION 1..9: note = ATaRI peptide
LKFYHHTIR

SEQ ID NO: 1384 - protein, 14 aa, synthetic construct
  REGION 1..14: note = ATaRI peptide
RLEMLQFQVNFSIK

SEQ ID NO: 1385 - protein, 11 aa, synthetic construct
  REGION 1..11: note = ATaRI peptide
VQQHKPEQVSA

SEQ ID NO: 1386 - protein, 11 aa, synthetic construct
  REGION 1..11: note = ATaRI peptide
SVTLKAAMVSV

SEQ ID NO: 1387 - protein, 56 aa, synthetic construct
  REGION 1..56: note = ATaRI peptide
IDLTAGAAGTVMCLITMFLSLMDGVSDGGPMRLYYHIFTVPFLCLDTFRYINTTVL

SEQ ID NO: 1388 - protein, 9 aa, synthetic construct
  REGION 1..9: note = ATaRI peptide
SGKIAKSQK

SEQ ID NO: 1389 - protein, 9 aa, synthetic construct
  REGION 1..9: note = ATaRI peptide
CWIADNRPV

SEQ ID NO: 1390 - protein, 21 aa, synthetic construct
  REGION 1..21: note = ATaRI peptide
LKRLGLESGKKKKKKKAASMF

SEQ ID NO: 1391 - protein, 13 aa, synthetic construct
  REGION 1..13: note = ATaRI peptide
GFQGDLKKVIEAY

SEQ ID NO: 1392 - protein, 24 aa, synthetic construct
  REGION 1..24: note = ATaRI peptide
MRDLEGYRVSTSFLNVHDFTVDKI

SEQ ID NO: 1393 - protein, 25 aa, synthetic construct
  REGION 1..25: note = ATaRI peptide
EEFRQTQQVRILMFPSTFINGVVDF

SEQ ID NO: 1394 - protein, 10 aa, synthetic construct
  REGION 1..10: note = ATaRI peptide
GLEKALQISM

SEQ ID NO: 1395 - protein, 14 aa, synthetic construct
  REGION 1..14: note = ATaRI peptide
TCDFFSPYGKFKLD

SEQ ID NO: 1396 - protein, 19 aa, synthetic construct
  REGION 1..19: note = ATaRI peptide
EMCSKFTRVGNSMHEHVIV

SEQ ID NO: 1397 - protein, 30 aa, synthetic construct
  REGION 1..30: note = ATaRI peptide
LIPEKLERVRWVLLSLLFGKIYAIWFRSDS

SEQ ID NO: 1398 - protein, 49 aa, synthetic construct
  REGION 1..49: note = ATaRI peptide
LYYAKDSKVTHENTSFKQLRLWMDVKFWFCKLFLSWKRTVALCSYMNSI

SEQ ID NO: 1399 - protein, 35 aa, synthetic construct
  REGION 1..35: note = ATaRI peptide
DIIEDEDGVSCCSVSALFPLTPLLCSALVEAEKDK

SEQ ID NO: 1400 - protein, 10 aa, synthetic construct
  REGION 1..10: note = ATaRI peptide
ALNSTDSDGM

SEQ ID NO: 1401 - protein, 11 aa, synthetic construct
  REGION 1..11: note = ATaRI peptide
QVIEEAGKGTH

SEQ ID NO: 1402 - protein, 9 aa, synthetic construct
  REGION 1..9: note = ATaRI peptide
FIDPDLDSV

SEQ ID NO: 1403 - protein, 14 aa, synthetic construct
  REGION 1..14: note = ATaRI peptide
WGGTKEDDVSNGSK

SEQ ID NO: 1404 - protein, 31 aa, synthetic construct
  REGION 1..31: note = ATaRI peptide
AQMLTRDRVCNKNILLEYCQVFKESEIVIKK

SEQ ID NO: 1405 - protein, 33 aa, synthetic construct
  REGION 1..33: note = ATaRI peptide
KQKTSSQPGRWSIWKGKYNIMKKELIKVTSWRS

SEQ ID NO: 1406 - protein, 36 aa, synthetic construct
  REGION 1..36: note = ATaRI peptide
HLERRDLKVFPLCSSVLENFIAKQNPFSCASSDTCF

SEQ ID NO: 1407 - protein, 9 aa, synthetic construct
  REGION 1..9: note = ATaRI peptide
TNVGHAVSR

SEQ ID NO: 1408 - protein, 42 aa, synthetic construct
  REGION 1..42: note = ATaRI peptide
EEHEDEVEGNLICFSKCWHVFCIRFPRRVFMHFHQIGSRLSV

SEQ ID NO: 1409 - protein, 24 aa, synthetic construct
  REGION 1..24: note = ATaRI peptide
FVFVVCGSGMGVSLNLYPMFSTGL

SEQ ID NO: 1410 - protein, 16 aa, synthetic construct
  REGION 1..16: note = ATaRI peptide
FRTQGRTEVRLFIWKF

SEQ ID NO: 1411 - protein, 18 aa, synthetic construct
  REGION 1..18: note = ATaRI peptide
ERIETAQQVNCSIFSKDV

SEQ ID NO: 1412 - protein, 35 aa, synthetic construct
  REGION 1..35: note = ATaRI peptide
DQDEGTKYRYVCLLHLLNILIFRSQSSEAFHNQCL

SEQ ID NO: 1413 - protein, 23 aa, synthetic construct
  REGION 1..23: note = ATaRI peptide
CEQLLKEQVIWSKREDQSLYLIF

SEQ ID NO: 1414 - protein, 10 aa, synthetic construct
  REGION 1..10: note = ATaRI peptide
LTSQLLKRVS

SEQ ID NO: 1415 - protein, 13 aa, synthetic construct
  REGION 1..13: note = ATaRI peptide
RAAAPKVRVSLLT

SEQ ID NO: 1416 - protein, 9 aa, synthetic construct
  REGION 1..9: note = ATaRI peptide
FTKPTSKLE

SEQ ID NO: 1417 - protein, 14 aa, synthetic construct
  REGION 1..14: note = ATaRI peptide
SKLYRCIDVRVSLL

SEQ ID NO: 1418 - protein, 12 aa, synthetic construct
  REGION 1..12: note = ATaRI peptide
FILFKPVRVSIR

SEQ ID NO: 1419 - protein, 9 aa, synthetic construct
  REGION 1..9: note = ATaRI peptide
HLHQHVEDG

SEQ ID NO: 1420 - protein, 17 aa, synthetic construct
  REGION 1..17: note = ATaRI peptide
GSQYSPNEVSFLKINGR

SEQ ID NO: 1421 - protein, 26 aa, synthetic construct
  REGION 1..26: note = ATaRI peptide
PGGPASRQVSEQSRRRLTREGRPGCA

SEQ ID NO: 1422 - protein, 9 aa, synthetic construct
  REGION 1..9: note = ATaRI peptide
IYLTQPSSS

SEQ ID NO: 1423 - protein, 10 aa, synthetic construct
  REGION 1..10: note = ATaRI peptide
EHECNIDEVI

SEQ ID NO: 1424 - protein, 10 aa, synthetic construct
  REGION 1..10: note = ATaRI peptide
VTSNGLPEVI

SEQ ID NO: 1425 - protein, 15 aa, synthetic construct
  REGION 1..15: note = ATaRI peptide
TLQTDSIDRYCTWYI

SEQ ID NO: 1426 - protein, 10 aa, synthetic construct
  REGION 1..10: note = ATaRI peptide
VMESMLKSVS

SEQ ID NO: 1427 - protein, 15 aa, synthetic construct
  REGION 1..15: note = ATaRI peptide
EVVMATYSSKLNFHK

SEQ ID NO: 1428 - protein, 9 aa, synthetic construct
  REGION 1..9: note = ATaRI peptide
SLSLFYKKG

SEQ ID NO: 1429 - protein, 14 aa, synthetic construct
  REGION 1..14: note = ATaRI peptide
PTKMTPRSRCVFSL

SEQ ID NO: 1430 - protein, 9 aa, synthetic construct
  REGION 1..9: note = ATaRI peptide
KPAMDYHAK

SEQ ID NO: 1431 - protein, 9 aa, synthetic construct
  REGION 1..9: note = ATaRI peptide
SARNDYGTR

SEQ ID NO: 1432 - protein, 22 aa, synthetic construct
  REGION 1..22: note = ATaRI peptide
SHSFKITWGKILCMFIHYYFCV

SEQ ID NO: 1433 - protein, 9 aa, synthetic construct
  REGION 1..9: note = ATaRI peptide
LQMEDKNGR

SEQ ID NO: 1434 - protein, 9 aa, synthetic construct
  REGION 1..9: note = ATaRI peptide
EAQRQKSQV

SEQ ID NO: 1435 - protein, 14 aa, synthetic construct
  REGION 1..14: note = ATaRI peptide
ARLLAYRTGELHRS

SEQ ID NO: 1436 - protein, 15 aa, synthetic construct
  REGION 1..15: note = ATaRI peptide
VIWAEGKSVSMKTIL

SEQ ID NO: 1437 - protein, 87 aa, synthetic construct
  REGION 1..87: note = ATaRI peptide
LEGVSKFTVSRYTFFSGVFCIMLLGTLLQYCKLVIPTLLKSFNKLLLLLLLLLFYYYYLRQSLSLLPRLECQWLDLGSLQTPPPGFK

SEQ ID NO: 1438 - protein, 45 aa, synthetic construct
  REGION 1..45: note = ATaRI peptide
QNEPERRESKYLCIEVNFVAEEKGYTVNFNDQVMKIVLIDGAYYF

SEQ ID NO: 1439 - protein, 29 aa, synthetic construct
  REGION 1..29: note = ATaRI peptide
INSSTSIKGMYISIPIVEYSLIFSCHEAG

SEQ ID NO: 1440 - protein, 9 aa, synthetic construct
  REGION 1..9: note = ATaRI peptide
DCSEGCIDM

SEQ ID NO: 1441 - protein, 9 aa, synthetic construct
  REGION 1..9: note = ATaRI peptide
RLQRQIPTG

SEQ ID NO: 1442 - protein, 20 aa, synthetic construct
  REGION 1..20: note = ATaRI peptide
GTFVCIYSGKAKVYFQIILE

SEQ ID NO: 1443 - protein, 22 aa, synthetic construct
  REGION 1..22: note = ATaRI peptide
FQHNGKKMVKNAKCSWDPSFLF

SEQ ID NO: 1444 - protein, 22 aa, synthetic construct
  REGION 1..22: note = ATaRI peptide
IAAHENCLVSYLKTYFKVHEYF

SEQ ID NO: 1445 - protein, 18 aa, synthetic construct
  REGION 1..18: note = ATaRI peptide
MDETTSESGTDEEQYFEV

SEQ ID NO: 1446 - protein, 13 aa, synthetic construct
  REGION 1..13: note = ATaRI peptide
SLPNPPSKVRSCD

SEQ ID NO: 1447 - protein, 40 aa, synthetic construct
  REGION 1..40: note = ATaRI peptide
SKKIGLRQVSDMDASSKCNYMEIAQPCDLRRNNTPGWELW

SEQ ID NO: 1448 - protein, 9 aa, synthetic construct
  REGION 1..9: note = ATaRI peptide
CHEAITDEE

SEQ ID NO: 1449 - protein, 23 aa, synthetic construct
  REGION 1..23: note = ATaRI peptide
SGTDKVIKVRCHLIKKLSIFGLI

SEQ ID NO: 1450 - protein, 11 aa, synthetic construct
  REGION 1..11: note = ATaRI peptide
FTEGQKLDSKY

SEQ ID NO: 1451 - protein, 23 aa, synthetic construct
  REGION 1..23: note = ATaRI peptide
DSQSAGITGMSHHARPKSGKKLS

SEQ ID NO: 1452 - protein, 42 aa, synthetic construct
  REGION 1..42: note = ATaRI peptide
KRCQEAQNGMWVSLGICFNLKRSKHLKFFWFKQICFYLYNFF

SEQ ID NO: 1453 - protein, 12 aa, synthetic construct
  REGION 1..12: note = ATaRI peptide
ATRMSIIQVGDF

SEQ ID NO: 1454 - protein, 10 aa, synthetic construct
  REGION 1..10: note = ATaRI peptide
TKSQPLEQGE

SEQ ID NO: 1455 - protein, 28 aa, synthetic construct
  REGION 1..28: note = ATaRI peptide
QSVDLLPPGEQFLHLLAFFSVIQILLVR

SEQ ID NO: 1456 - protein, 13 aa, synthetic construct
  REGION 1..13: note = ATaRI peptide
DIILIALNVGYIY

SEQ ID NO: 1457 - protein, 26 aa, synthetic construct
  REGION 1..26: note = ATaRI peptide
PPFVPFGQVMTFVLADEFKLGKSVFH

SEQ ID NO: 1458 - protein, 9 aa, synthetic construct
  REGION 1..9: note = ATaRI peptide
LAFQQKDAR

SEQ ID NO: 1459 - protein, 9 aa, synthetic construct
  REGION 1..9: note = ATaRI peptide
QENYDKVKR

SEQ ID NO: 1460 - protein, 18 aa, synthetic construct
  REGION 1..18: note = ATaRI peptide
MYEKYVASRQDLHYFPRK

SEQ ID NO: 1461 - protein, 25 aa, synthetic construct
  REGION 1..25: note = ATaRI peptide
HKKRLMVERSECVSARILLVMDGLV

SEQ ID NO: 1462 - protein, 9 aa, synthetic construct
  REGION 1..9: note = ATaRI peptide
TFKEMLQDR

SEQ ID NO: 1463 - protein, 19 aa, synthetic construct
  REGION 1..19: note = ATaRI peptide
SSLPRSYTVKNVLGSFSLF

SEQ ID NO: 1464 - protein, 13 aa, synthetic construct
  REGION 1..13: note = ATaRI peptide
IFVASVEAGKLCV

SEQ ID NO: 1465 - protein, 35 aa, synthetic construct
  REGION 1..35: note = ATaRI peptide
DVRRYGKAGEFVLPPCLAFETGTWPLASGSNNLLQ

SEQ ID NO: 1466 - protein, 46 aa, synthetic construct
  REGION 1..46: note = ATaRI peptide
FSESLQSSVSIWRSRKYWCGVKQLLELCMEENNFFCLYNFDANFKM

SEQ ID NO: 1467 - protein, 18 aa, synthetic construct
  REGION 1..18: note = ATaRI peptide
ESNAFESKGKYHLYNLHL

SEQ ID NO: 1468 - protein, 16 aa, synthetic construct
  REGION 1..16: note = ATaRI peptide
KEQDRLLQVALAHVDG

SEQ ID NO: 1469 - protein, 17 aa, synthetic construct
  REGION 1..17: note = ATaRI peptide
SSGFLPGDRYVEHVIVI

SEQ ID NO: 1470 - protein, 29 aa, synthetic construct
  REGION 1..29: note = ATaRI peptide
CYHLHCFKVRLRQTACRPAKLCLESAWLL

SEQ ID NO: 1471 - protein, 16 aa, synthetic construct
  REGION 1..16: note = ATaRI peptide
AAAETSQRVRKFHHFF

SEQ ID NO: 1472 - protein, 27 aa, synthetic construct
  REGION 1..27: note = ATaRI peptide
NSMQVSAKVFALVMYLPIHVCYTGAIT

SEQ ID NO: 1473 - protein, 52 aa, synthetic construct
  REGION 1..52: note = ATaRI peptide
AGTSLDRLVSIHRLITMADALFYQGHSLKLPGDSGKVCYKSHLMLISASVLN

SEQ ID NO: 1474 - protein, 9 aa, synthetic construct
  REGION 1..9: note = ATaRI peptide
CWNGHSKAR

SEQ ID NO: 1475 - protein, 32 aa, synthetic construct
  REGION 1..32: note = ATaRI peptide
PFMGSLAECEYLSEHFLKSFYTRYLLFFYFLS

SEQ ID NO: 1476 - protein, 9 aa, synthetic construct
  REGION 1..9: note = ATaRI peptide
DLLPGFLQV

SEQ ID NO: 1477 - protein, 15 aa, synthetic construct
  REGION 1..15: note = ATaRI peptide
KSTACQMLVREHCFY

SEQ ID NO: 1478 - protein, 15 aa, synthetic construct
  REGION 1..15: note = ATaRI peptide
KPIVKQIRSEYIPYV

SEQ ID NO: 1479 - protein, 66 aa, synthetic construct
  REGION 1..66: note = ATaRI peptide
IKLRPDANVSGPGGKGDPLSHGMACVLQGVEVCLAGLLLNLWPVLPRCFCPHERRASLGQMYPNGR

SEQ ID NO: 1480 - protein, 9 aa, synthetic construct
  REGION 1..9: note = ATaRI peptide
GHKKVQFER

SEQ ID NO: 1481 - protein, 102 aa, synthetic construct
  REGION 1..102: note = ATaRI peptide
DEDEGRRKVQGRGLKRVCGCVCTCVCVNFKNCTKIYIRAKVPCEPFSSVQLAGIKYIHVVVPLSRPSISRTYLPKQKLHPFVTNSSFPLLPATGTSFYFLSL

SEQ ID NO: 1482 - protein, 20 aa, synthetic construct
  REGION 1..20: note = ATaRI peptide
KDLEVITSVCAVFPQKHSIT

SEQ ID NO: 1483 - protein, 42 aa, synthetic construct
  REGION 1..42: note = ATaRI peptide
RRPLLLVKVKMELGYSFLSSDDPLILGTHQAATHPLIVSNQP

SEQ ID NO: 1484 - protein, 53 aa, synthetic construct
  REGION 1..53: note = ATaRI peptide
HAVKNDFQVSSASLAPERRADSFFFFFLDLLFLPAVSPSKPPICKKYLLLIFH

SEQ ID NO: 1485 - protein, 9 aa, synthetic construct
  REGION 1..9: note = ATaRI peptide
VAAKLEPKR

SEQ ID NO: 1486 - protein, 9 aa, synthetic construct
  REGION 1..9: note = ATaRI peptide
PHTHIQWFR

SEQ ID NO: 1487 - protein, 29 aa, synthetic construct
  REGION 1..29: note = ATaRI peptide
LERRTSATGESPPPLGPTPMLLPGGSPST

SEQ ID NO: 1488 - protein, 14 aa, synthetic construct
  REGION 1..14: note = ATaRI peptide
GQDTVESEVTVIKY

SEQ ID NO: 1489 - protein, 25 aa, synthetic construct
  REGION 1..25: note = ATaRI peptide
SLSVYHPQVRGSRTLGTQLLAFDQD

SEQ ID NO: 1490 - protein, 12 aa, synthetic construct
  REGION 1..12: note = ATaRI peptide
RIQSQRYQVSLW

SEQ ID NO: 1491 - protein, 32 aa, synthetic construct
  REGION 1..32: note = ATaRI peptide
WEKTKPVTVSPARWGRRRLLTQQCDLVTFFQA

SEQ ID NO: 1492 - protein, 12 aa, synthetic construct
  REGION 1..12: note = ATaRI peptide
PSKARLKEVPHS

SEQ ID NO: 1493 - protein, 13 aa, synthetic construct
  REGION 1..13: note = ATaRI peptide
RPEGLTSTGLYLL

SEQ ID NO: 1494 - protein, 33 aa, synthetic construct
  REGION 1..33: note = ATaRI peptide
RKKKKKKTGTLCSWHTPIWGYSLSRFSGSAAAH

SEQ ID NO: 1495 - protein, 17 aa, synthetic construct
  REGION 1..17: note = ATaRI peptide
AGLLKPDQVCGFGWWEK

SEQ ID NO: 1496 - protein, 31 aa, synthetic construct
  REGION 1..31: note = ATaRI peptide
SGDLYLQTGNRGPRLEACQLCRHCLCCTLLC

SEQ ID NO: 1497 - protein, 72 aa, synthetic construct
  REGION 1..72: note = ATaRI peptide
EQWKCDIVRYWRARDSFHIVLVLPFVLVHLTPQGTMRPFLGGSTCSLHGYRLSLNLCLILTGKLDVESELAF

SEQ ID NO: 1498 - protein, 13 aa, synthetic construct
  REGION 1..13: note = ATaRI peptide
TRLDLSQLGTATS

SEQ ID NO: 1499 - protein, 16 aa, synthetic construct
  REGION 1..16: note = ATaRI peptide
QNKESKKEVFFPPSIV

SEQ ID NO: 1500 - protein, 14 aa, synthetic construct
  REGION 1..14: note = ATaRI peptide
QESIVKDKVFWGFF

SEQ ID NO: 1501 - protein, 32 aa, synthetic construct
  REGION 1..32: note = ATaRI peptide
VQTLLRSEVGAAGPGRESVESSGLRAWLPFPA

SEQ ID NO: 1502 - protein, 23 aa, synthetic construct
  REGION 1..23: note = ATaRI peptide
KRYGCVFQVSIRHLSFPVTDILP

SEQ ID NO: 1503 - protein, 35 aa, synthetic construct
  REGION 1..35: note = ATaRI peptide
WSNSLEKKVGCTLSCCYGICIISSDYLKTKPFCSY

SEQ ID NO: 1504 - protein, 9 aa, synthetic construct
  REGION 1..9: note = ATaRI peptide
YGPLHIRAG

SEQ ID NO: 1505 - protein, 37 aa, synthetic construct
  REGION 1..37: note = ATaRI peptide
ESKILHLQVRILGLRPDQRVEELACVPLKGFLANSLS

SEQ ID NO: 1506 - protein, 160 aa, synthetic construct
  REGION 1..160: note = ATaRI peptide
AGQVARNTGEAGAGAGPAVCIWAPGECWGGVRGMRAMLGTCALGQFFLIMGNTQRCDDFPTESPPAKTNVSRAGLSPPCEALHGVESRGSCSHGKLQSPPGRDWPQGDPQDRPKRRWQRPGPAGRGAPDPTPKGQGAAVPPRSASMFLIHKQMWAYGFGD

SEQ ID NO: 1507 - protein, 27 aa, synthetic construct
  REGION 1..27: note = ATaRI peptide
LNPTSLQKVRLVQCLVLFKKLSVLIAI

SEQ ID NO: 1508 - protein, 19 aa, synthetic construct
  REGION 1..19: note = ATaRI peptide
KILNHPNIGTFCFFKYFGV

SEQ ID NO: 1509 - protein, 14 aa, synthetic construct
  REGION 1..14: note = ATaRI peptide
LLSLMFTFVSDRTY

SEQ ID NO: 1510 - protein, 9 aa, synthetic construct
  REGION 1..9: note = ATaRI peptide
NIFLKQFKW

SEQ ID NO: 1511 - protein, 29 aa, synthetic construct
  REGION 1..29: note = ATaRI peptide
SLTPGGERVGAVAYICNSSTLGGRGERIT

SEQ ID NO: 1512 - protein, 18 aa, synthetic construct
  REGION 1..18: note = ATaRI peptide
EECELMLQVCRERLGPGG

SEQ ID NO: 1513 - protein, 18 aa, synthetic construct
  REGION 1..18: note = ATaRI peptide
KDLGSLNGVSVRGPGLAF

SEQ ID NO: 1514 - protein, 53 aa, synthetic construct
  REGION 1..53: note = ATaRI peptide
RVPEEALKVSAGQARVAQPRGLSPPSSPPCSRCHLPSKHSPGLWGALFRLRVP

SEQ ID NO: 1515 - protein, 54 aa, synthetic construct
  REGION 1..54: note = ATaRI peptide
SGSARYTSSECQGGWEARAKTGLPVGLQHLGCQLSAGRGPLVLAREEPLFPKLG

SEQ ID NO: 1516 - protein, 33 aa, synthetic construct
  REGION 1..33: note = ATaRI peptide
CKALIQTKVSGHQGEASGNRAGGVHTCGALRFL

SEQ ID NO: 1517 - protein, 9 aa, synthetic construct
  REGION 1..9: note = ATaRI peptide
LSTPKPKLR

SEQ ID NO: 1518 - protein, 39 aa, synthetic construct
  REGION 1..39: note = ATaRI peptide
SVSDTVALVSRLGPHPPVPHIRHTNAAFKGLTWRGGAHI

SEQ ID NO: 1519 - protein, 26 aa, synthetic construct
  REGION 1..26: note = ATaRI peptide
VLAEKLLKGECKSTSKVEGVKKAKGY

SEQ ID NO: 1520 - protein, 15 aa, synthetic construct
  REGION 1..15: note = ATaRI peptide
SHWVEIHQVSFPSTT

SEQ ID NO: 1521 - protein, 34 aa, synthetic construct
  REGION 1..34: note = ATaRI peptide
QCLRRLQQVSQDPHVPLTQPGSVASSTFPVGTYS

SEQ ID NO: 1522 - protein, 9 aa, synthetic construct
  REGION 1..9: note = ATaRI peptide
FLFLWVTGR

SEQ ID NO: 1523 - protein, 22 aa, synthetic construct
  REGION 1..22: note = ATaRI peptide
NVPTVTLLVSDSAKIGTLAFRV

SEQ ID NO: 1524 - protein, 9 aa, synthetic construct
  REGION 1..9: note = ATaRI peptide
ERETFAVSG

SEQ ID NO: 1525 - protein, 14 aa, synthetic construct
  REGION 1..14: note = ATaRI peptide
GTGLSPPQVTYPLV

SEQ ID NO: 1526 - protein, 23 aa, synthetic construct
  REGION 1..23: note = ATaRI peptide
RPRGSQSSGKYYKRKVDLGGRRI

SEQ ID NO: 1527 - protein, 9 aa, synthetic construct
  REGION 1..9: note = ATaRI peptide
DEFLKKPAR

SEQ ID NO: 1528 - protein, 14 aa, synthetic construct
  REGION 1..14: note = ATaRI peptide
LTVHYYCLVSIIYN

SEQ ID NO: 1529 - protein, 9 aa, synthetic construct
  REGION 1..9: note = ATaRI peptide
IFQFTGNFA

SEQ ID NO: 1530 - protein, 11 aa, synthetic construct
  REGION 1..11: note = ATaRI peptide
GRDYNAPDRYF

SEQ ID NO: 1531 - protein, 23 aa, synthetic construct
  REGION 1..23: note = ATaRI peptide
KNLSLNSQGNYFIYCCIYQISHV

SEQ ID NO: 1532 - protein, 9 aa, synthetic construct
  REGION 1..9: note = ATaRI peptide
QRVHTPFER

SEQ ID NO: 1533 - protein, 23 aa, synthetic construct
  REGION 1..23: note = ATaRI peptide
SAVTQVAKVREFGGLMTFCQCKI

SEQ ID NO: 1534 - protein, 9 aa, synthetic construct
  REGION 1..9: note = ATaRI peptide
KFWQKHKGR

SEQ ID NO: 1535 - protein, 10 aa, synthetic construct
  REGION 1..10: note = ATaRI peptide
VVGVNDTEVR

SEQ ID NO: 1536 - protein, 16 aa, synthetic construct
  REGION 1..16: note = ATaRI peptide
EYYRMKKEVCLLFTFS

SEQ ID NO: 1537 - protein, 13 aa, synthetic construct
  REGION 1..13: note = ATaRI peptide
KHMEMSLKVYVHI

SEQ ID NO: 1538 - protein, 29 aa, synthetic construct
  REGION 1..29: note = ATaRI peptide
ERDAALSKVTLHISVKAYTYHFPLYFFNH

SEQ ID NO: 1539 - protein, 30 aa, synthetic construct
  REGION 1..30: note = ATaRI peptide
RKQSVNISVSFINRLEITPNPPIKRLTLFL

SEQ ID NO: 1540 - protein, 57 aa, synthetic construct
  REGION 1..57: note = ATaRI peptide
QLDSNVTMVCKFLSFKMYNVYLIERVYIYFQSLKIHLPSQCYFHSLQYTINSNNSLH

SEQ ID NO: 1541 - protein, 35 aa, synthetic construct
  REGION 1..35: note = ATaRI peptide
EESQRKMNGKYAKRSIELFIVGKVICSYAHVCFLK

SEQ ID NO: 1542 - protein, 16 aa, synthetic construct
  REGION 1..16: note = ATaRI peptide
EEIQMSTKVSKLILSC

SEQ ID NO: 1543 - protein, 12 aa, synthetic construct
  REGION 1..12: note = ATaRI peptide
QLQESQKQVCAP

SEQ ID NO: 1544 - protein, 12 aa, synthetic construct
  REGION 1..12: note = ATaRI peptide
ESENGAYLGIKS

SEQ ID NO: 1545 - protein, 10 aa, synthetic construct
  REGION 1..10: note = ATaRI peptide
ATEELETYRY

SEQ ID NO: 1546 - protein, 14 aa, synthetic construct
  REGION 1..14: note = ATaRI peptide
EKKAHDNWVSLKFP

SEQ ID NO: 1547 - protein, 37 aa, synthetic construct
  REGION 1..37: note = ATaRI peptide
VPNTAFGRGSLFFFTPHLKYIFYIYIYIAHIVSISVS

SEQ ID NO: 1548 - protein, 63 aa, synthetic construct
  REGION 1..63: note = ATaRI peptide
NDTKDDLGVSIERVELYACIQKPSFFFFFFFYGVSLLLPKLECSGAISAHCNLGSSNSPASAS

SEQ ID NO: 1549 - protein, 12 aa, synthetic construct
  REGION 1..12: note = ATaRI peptide
GPPPAPFASMLF

SEQ ID NO: 1550 - protein, 31 aa, synthetic construct
  REGION 1..31: note = ATaRI peptide
SVRNLQQKVCGKSLFYKQLYKQSLFLHPGKG

SEQ ID NO: 1551 - protein, 34 aa, synthetic construct
  REGION 1..34: note = ATaRI peptide
VQALSQHVGKKSYFGTQIIFTFFSCFLIPSILFL

SEQ ID NO: 1552 - protein, 20 aa, synthetic construct
  REGION 1..20: note = ATaRI peptide
QDMTEKLAGKYFVISKEIFY

SEQ ID NO: 1553 - protein, 9 aa, synthetic construct
  REGION 1..9: note = ATaRI peptide
EDFGSDVNK

SEQ ID NO: 1554 - protein, 21 aa, synthetic construct
  REGION 1..21: note = ATaRI peptide
ATPGSDIKVSKMFFHLLQLRK

SEQ ID NO: 1555 - protein, 19 aa, synthetic construct
  REGION 1..19: note = ATaRI peptide
IEGMRHEEVGFYCNFLLLV

SEQ ID NO: 1556 - protein, 35 aa, synthetic construct
  REGION 1..35: note = ATaRI peptide
RKFPVPQKVWIKERKNIFRWLPEVFLFLSCVCVLY

SEQ ID NO: 1557 - protein, 19 aa, synthetic construct
  REGION 1..19: note = ATaRI peptide
QPMKRGQKVNFRMIYMVHS

SEQ ID NO: 1558 - protein, 37 aa, synthetic construct
  REGION 1..37: note = ATaRI peptide
PNFDGKLKGLCLLMNMFASLSLIIKMSFYLLGLWLIV

SEQ ID NO: 1559 - protein, 72 aa, synthetic construct
  REGION 1..72: note = ATaRI peptide
GRRLDDRIVSAGRPGSYVRAWTHDFTPHVPRAGRRLPRTAPPSCGASVPDFCSSPNSWDLPPAWSHPLVSYP

SEQ ID NO: 1560 - protein, 9 aa, synthetic construct
  REGION 1..9: note = ATaRI peptide
SWFGPGSVL

SEQ ID NO: 1561 - protein, 24 aa, synthetic construct
  REGION 1..24: note = ATaRI peptide
PEAYFPSWVSTVFKFERVFSLGHF

SEQ ID NO: 1562 - protein, 17 aa, synthetic construct
  REGION 1..17: note = ATaRI peptide
QSTDSLPQVLKELKNIS

SEQ ID NO: 1563 - protein, 28 aa, synthetic construct
  REGION 1..28: note = ATaRI peptide
RRLLLAFHGKSLPTFPQPGSAQPSHALP

SEQ ID NO: 1564 - protein, 16 aa, synthetic construct
  REGION 1..16: note = ATaRI peptide
EIQRTLMEVIFGKGGL

SEQ ID NO: 1565 - protein, 23 aa, synthetic construct
  REGION 1..23: note = ATaRI peptide
YPMRREMQVWQPFLCSNQPMLLS

SEQ ID NO: 1566 - protein, 9 aa, synthetic construct
  REGION 1..9: note = ATaRI peptide
KPNFQQLFR

SEQ ID NO: 1567 - protein, 9 aa, synthetic construct
  REGION 1..9: note = ATaRI peptide
METFGMKYR

SEQ ID NO: 1568 - protein, 9 aa, synthetic construct
  REGION 1..9: note = ATaRI peptide
CRGKQLGKL

SEQ ID NO: 1569 - protein, 18 aa, synthetic construct
  REGION 1..18: note = ATaRI peptide
VVSPEQFMSKYYNLFFLK

SEQ ID NO: 1570 - protein, 17 aa, synthetic construct
  REGION 1..17: note = ATaRI peptide
ASQSAGITGVSHCARPE

SEQ ID NO: 1571 - protein, 11 aa, synthetic construct
  REGION 1..11: note = ATaRI peptide
TECQLEAQVCA

SEQ ID NO: 1572 - protein, 48 aa, synthetic construct
  REGION 1..48: note = ATaRI peptide
SMTEHALGGECVLPACPHVPVTVCLGELAICCLYRGRSSGELGEDKEG

SEQ ID NO: 1573 - protein, 32 aa, synthetic construct
  REGION 1..32: note = ATaRI peptide
DRCKQLTQVKTFLCTRDILPKSEATKDFRNCP

SEQ ID NO: 1574 - protein, 17 aa, synthetic construct
  REGION 1..17: note = ATaRI peptide
ETQQMQMKVYFHSLETR

SEQ ID NO: 1575 - protein, 17 aa, synthetic construct
  REGION 1..17: note = ATaRI peptide
NTTNQLESKYVSKYLIF

SEQ ID NO: 1576 - protein, 20 aa, synthetic construct
  REGION 1..20: note = ATaRI peptide
EQAATQLKVIYSHLYLSFHE

SEQ ID NO: 1577 - protein, 16 aa, synthetic construct
  REGION 1..16: note = ATaRI peptide
FHSQIAAQVMMLSYCL

SEQ ID NO: 1578 - protein, 9 aa, synthetic construct
  REGION 1..9: note = ATaRI peptide
VLAEELHKV

SEQ ID NO: 1579 - protein, 10 aa, synthetic construct
  REGION 1..10: note = ATaRI peptide
LKAKQNDQVM

SEQ ID NO: 1580 - protein, 9 aa, synthetic construct
  REGION 1..9: note = ATaRI peptide
SLVEELKKV

SEQ ID NO: 1581 - protein, 9 aa, synthetic construct
  REGION 1..9: note = ATaRI peptide
SKVQELQNL

SEQ ID NO: 1582 - protein, 72 aa, synthetic construct
  REGION 1..72: note = ATaRI peptide
PSVPGGDSGKVLAGLPLLSLSPGPRTGRVCVWPLLLAFGLVSSGPPSTPLCTAHYCVFQSPLLFPFLSLWFL

SEQ ID NO: 1583 - protein, 23 aa, synthetic construct
  REGION 1..23: note = ATaRI peptide
ATAKERSKVTYFDQSEISFCFNF

SEQ ID NO: 1584 - protein, 12 aa, synthetic construct
  REGION 1..12: note = ATaRI peptide
SKPLFMGVVSFT

SEQ ID NO: 1585 - protein, 11 aa, synthetic construct
  REGION 1..11: note = ATaRI peptide
DISLVDQEVSI

SEQ ID NO: 1586 - protein, 9 aa, synthetic construct
  REGION 1..9: note = ATaRI peptide
YHFLEVNKQ

SEQ ID NO: 1587 - protein, 13 aa, synthetic construct
  REGION 1..13: note = ATaRI peptide
NLCFYTSQVTTLE

SEQ ID NO: 1588 - protein, 20 aa, synthetic construct
  REGION 1..20: note = ATaRI peptide
HRSPTKMKVSGVNSAPILAP

SEQ ID NO: 1589 - protein, 15 aa, synthetic construct
  REGION 1..15: note = ATaRI peptide
VKRLVKVKVIFVFMQ

SEQ ID NO: 1590 - protein, 9 aa, synthetic construct
  REGION 1..9: note = ATaRI peptide
DLLHQKLWG

SEQ ID NO: 1591 - protein, 27 aa, synthetic construct
  REGION 1..27: note = ATaRI peptide
DQVKGPLRVCMLYGLKSEIIIDLYHIY

SEQ ID NO: 1592 - protein, 9 aa, synthetic construct
  REGION 1..9: note = ATaRI peptide
VRSFIDSKL

SEQ ID NO: 1593 - protein, 17 aa, synthetic construct
  REGION 1..17: note = ATaRI peptide
LYKFMEDRGIFMLIILK

SEQ ID NO: 1594 - protein, 11 aa, synthetic construct
  REGION 1..11: note = ATaRI peptide
KKQKKKAKVCL

SEQ ID NO: 1595 - protein, 10 aa, synthetic construct
  REGION 1..10: note = ATaRI peptide
TSLNGTSRGM

SEQ ID NO: 1596 - protein, 14 aa, synthetic construct
  REGION 1..14: note = ATaRI peptide
NMEVSCHRGNRDFY

SEQ ID NO: 1597 - protein, 13 aa, synthetic construct
  REGION 1..13: note = ATaRI peptide
DPPQLTVQVCQGA

SEQ ID NO: 1598 - protein, 49 aa, synthetic construct
  REGION 1..49: note = ATaRI peptide
DEIIDVIQVTKLRNHEKLFFYRYFSRLLTIFGLSILCYSALRYFLLLLS

SEQ ID NO: 1599 - protein, 64 aa, synthetic construct
  REGION 1..64: note = ATaRI peptide
STILSENLGKDKTMVCFRELKKRGGESPREESLRQHRTTLGHCPCCLLLLHYMALLVIIVSLSP

SEQ ID NO: 1600 - protein, 11 aa, synthetic construct
  REGION 1..11: note = ATaRI peptide
VAAEDFSQVPN

SEQ ID NO: 1601 - protein, 10 aa, synthetic construct
  REGION 1..10: note = ATaRI peptide
TAMAAGSLGK

SEQ ID NO: 1602 - protein, 16 aa, synthetic construct
  REGION 1..16: note = ATaRI peptide
TYCSINIKVSVHIKHL

SEQ ID NO: 1603 - protein, 9 aa, synthetic construct
  REGION 1..9: note = ATaRI peptide
PPGGELASK

SEQ ID NO: 1604 - protein, 9 aa, synthetic construct
  REGION 1..9: note = ATaRI peptide
EIRKKVLKM

SEQ ID NO: 1605 - protein, 14 aa, synthetic construct
  REGION 1..14: note = ATaRI peptide
EVTCHRIKGRFPEY

SEQ ID NO: 1606 - protein, 19 aa, synthetic construct
  REGION 1..19: note = ATaRI peptide
TVPLIHFPVSTLKGFCCLV

SEQ ID NO: 1607 - protein, 20 aa, synthetic construct
  REGION 1..20: note = ATaRI peptide
EGNSQETEVRKLCNSYYVWL

SEQ ID NO: 1608 - protein, 16 aa, synthetic construct
  REGION 1..16: note = ATaRI peptide
ENESLSGTGTDKIWSN

SEQ ID NO: 1609 - protein, 11 aa, synthetic construct
  REGION 1..11: note = ATaRI peptide
WINSQLARVSK

SEQ ID NO: 1610 - protein, 12 aa, synthetic construct
  REGION 1..12: note = ATaRI peptide
TKKEEIKEVFAV

SEQ ID NO: 1611 - protein, 9 aa, synthetic construct
  REGION 1..9: note = ATaRI peptide
ASINSLLER

SEQ ID NO: 1612 - protein, 24 aa, synthetic construct
  REGION 1..24: note = ATaRI peptide
QAKLTDLQVITKNIISLIILFIRK

SEQ ID NO: 1613 - protein, 16 aa, synthetic construct
  REGION 1..16: note = ATaRI peptide
LERLEQSKVIVLAISQ

SEQ ID NO: 1614 - protein, 67 aa, synthetic construct
  REGION 1..67: note = ATaRI peptide
VKLKAAEEVTPEELCHHPPQPPPGSYRLPLALFGPPCENFYHPQETLVYLFCKSEMGGLDLWPLVCP

SEQ ID NO: 1615 - protein, 17 aa, synthetic construct
  REGION 1..17: note = ATaRI peptide
ESISSLPEVSDQQVGWG

SEQ ID NO: 1616 - protein, 9 aa, synthetic construct
  REGION 1..9: note = ATaRI peptide
KDLVQDPSL

SEQ ID NO: 1617 - protein, 39 aa, synthetic construct
  REGION 1..39: note = ATaRI peptide
GESQAGEQVRLIGLKGTEDFSFMDFGHLILNFSYQFSGN

SEQ ID NO: 1618 - protein, 40 aa, synthetic construct
  REGION 1..40: note = ATaRI peptide
FGRVFMKPGYENHLVISYMGLVWLALTNKFLNAFFLHFLL

SEQ ID NO: 1619 - protein, 10 aa, synthetic construct
  REGION 1..10: note = ATaRI peptide
PQAVKIRAGK

SEQ ID NO: 1620 - protein, 25 aa, synthetic construct
  REGION 1..25: note = ATaRI peptide
AETLTEDQVLLIRVVEEWKVIVSEV

SEQ ID NO: 1621 - protein, 12 aa, synthetic construct
  REGION 1..12: note = ATaRI peptide
PDSSSPRHVSHS

SEQ ID NO: 1622 - protein, 13 aa, synthetic construct
  REGION 1..13: note = ATaRI peptide
PEKLRNSVVSFNI

SEQ ID NO: 1623 - protein, 18 aa, synthetic construct
  REGION 1..18: note = ATaRI peptide
EYNQYEVRSKYFISTFSF

SEQ ID NO: 1624 - protein, 12 aa, synthetic construct
  REGION 1..12: note = ATaRI peptide
FMSILFNKVIYH

SEQ ID NO: 1625 - protein, 9 aa, synthetic construct
  REGION 1..9: note = ATaRI peptide
VKFWERDYK

SEQ ID NO: 1626 - protein, 15 aa, synthetic construct
  REGION 1..15: note = ATaRI peptide
ASQLDRNPGNSSICD

SEQ ID NO: 1627 - protein, 17 aa, synthetic construct
  REGION 1..17: note = ATaRI peptide
VLTTYYVKVGVCAYLDL

SEQ ID NO: 1628 - protein, 27 aa, synthetic construct
  REGION 1..27: note = ATaRI peptide
YTPNNKQQVRDPPVICVFTLVSFPLEA

SEQ ID NO: 1629 - protein, 10 aa, synthetic construct
  REGION 1..10: note = ATaRI peptide
EDSIADQMGK

SEQ ID NO: 1630 - protein, 10 aa, synthetic construct
  REGION 1..10: note = ATaRI peptide
LSPNKQGHVS

SEQ ID NO: 1631 - protein, 85 aa, synthetic construct
  REGION 1..85: note = ATaRI peptide
TLGMKSLHGKWSFSCSLDGPVDDGQCPQTWLPLMCSERGPVSMLRWSQLTRPFLICPLSPVIPDHHSHLGCLLEITDSHTGPKTS

SEQ ID NO: 1632 - protein, 47 aa, synthetic construct
  REGION 1..47: note = ATaRI peptide
KKKEKKEDVCVLTTTYHFYRLFFMISLLYFDYMSVFFFLFFFFFFFF

SEQ ID NO: 1633 - protein, 9 aa, synthetic construct
  REGION 1..9: note = ATaRI peptide
RNKDRSRSR

SEQ ID NO: 1634 - protein, 76 aa, synthetic construct
  REGION 1..76: note = ATaRI peptide
PKGACRPTVSCLQPLLSLPPMLVSTQSPEGAKVAGGWHVSAAPSARTPGQVMTAPSLSHNFALKSEPADARGFLDP

SEQ ID NO: 1635 - protein, 37 aa, synthetic construct
  REGION 1..37: note = ATaRI peptide
VCVDGSCRVSGAPAPPCLRAAWGLSAGVSLSITHRPR

SEQ ID NO: 1636 - protein, 48 aa, synthetic construct
  REGION 1..48: note = ATaRI peptide
FDANDLSRGGGGSDKGQLPAPFLACPFLACPCSGLDSRPSGPHGTGRL

SEQ ID NO: 1637 - protein, 9 aa, synthetic construct
  REGION 1..9: note = ATaRI peptide
LHPCPETKR

SEQ ID NO: 1638 - protein, 43 aa, synthetic construct
  REGION 1..43: note = ATaRI peptide
WSPEPWGEVRPLARMGLVLDLGSSREGLGSCSLLWKPRSWEVK

SEQ ID NO: 1639 - protein, 34 aa, synthetic construct
  REGION 1..34: note = ATaRI peptide
PGAPCQQSRWVLETGLPPPPSKREGGTPWVGQHL

SEQ ID NO: 1640 - protein, 11 aa, synthetic construct
  REGION 1..11: note = ATaRI peptide
DGQPVSSPRFI

SEQ ID NO: 1641 - protein, 11 aa, synthetic construct
  REGION 1..11: note = ATaRI peptide
IKEALARWVST

SEQ ID NO: 1642 - protein, 19 aa, synthetic construct
  REGION 1..19: note = ATaRI peptide
QVERELDDVSFIPFLQKGN

SEQ ID NO: 1643 - protein, 25 aa, synthetic construct
  REGION 1..25: note = ATaRI peptide
EFAASFKSVSNIPYLLRSIQSFAPE

SEQ ID NO: 1644 - protein, 17 aa, synthetic construct
  REGION 1..17: note = ATaRI peptide
MMDCLYAKCEYHTFMFP

SEQ ID NO: 1645 - protein, 9 aa, synthetic construct
  REGION 1..9: note = ATaRI peptide
GQKYRVALR

SEQ ID NO: 1646 - protein, 19 aa, synthetic construct
  REGION 1..19: note = ATaRI peptide
CLVQRVTQVLSVHNCLLCA

SEQ ID NO: 1647 - protein, 23 aa, synthetic construct
  REGION 1..23: note = ATaRI peptide
DPSTMTPQVRKHLPEPHLSPRGP

SEQ ID NO: 1648 - protein, 9 aa, synthetic construct
  REGION 1..9: note = ATaRI peptide
AAQELKMLR

SEQ ID NO: 1649 - protein, 32 aa, synthetic construct
  REGION 1..32: note = ATaRI peptide
SSRPGMYPVWENVCSENEMVSTLYVSMLFDFF

SEQ ID NO: 1650 - protein, 15 aa, synthetic construct
  REGION 1..15: note = ATaRI peptide
RKLKEINKVILRNIE

SEQ ID NO: 1651 - protein, 24 aa, synthetic construct
  REGION 1..24: note = ATaRI peptide
VCEIETDKVGLSYIRTSFSWASLS

SEQ ID NO: 1652 - protein, 174 aa, synthetic construct
  REGION 1..174: note = ATaRI peptide
QEQPVVNAGELLVAGIGEVLGGRCMSTDLLPHAEDQQTKAFYLLPIEISVSSPGISWFTFLKQHHDYFLPASWAEQFLFPVYSSAAAQAAGSSGIAQLSRLSPVKVEARVLASSPPPAPQALLPWGLTSTVGVGSWLTFDLRSMGLTGSFGLASHGPGAYFLSFLLTYVIVVLT

SEQ ID NO: 1653 - protein, 10 aa, synthetic construct
  REGION 1..10: note = ATaRI peptide
TITELGEKVK

SEQ ID NO: 1654 - protein, 38 aa, synthetic construct
  REGION 1..38: note = ATaRI peptide
RGVYLINNVSMQQMANLSPHLFFPPSPFVLVTNIVPFH

SEQ ID NO: 1655 - protein, 32 aa, synthetic construct
  REGION 1..32: note = ATaRI peptide
NKKSGDYVRYWLCLSQKSEVSVSDVGVVEVER

SEQ ID NO: 1656 - protein, 9 aa, synthetic construct
  REGION 1..9: note = ATaRI peptide
VNLSPSLAW

SEQ ID NO: 1657 - protein, 10 aa, synthetic construct
  REGION 1..10: note = ATaRI peptide
ISDMFTVVGE

SEQ ID NO: 1658 - protein, 26 aa, synthetic construct
  REGION 1..26: note = ATaRI peptide
RNPFQKPQVSQFHSREPEGGLLGSGG

SEQ ID NO: 1659 - protein, 9 aa, synthetic construct
  REGION 1..9: note = ATaRI peptide
TSETWEIYG

SEQ ID NO: 1660 - protein, 12 aa, synthetic construct
  REGION 1..12: note = ATaRI peptide
RAMRPKYPGTCW

SEQ ID NO: 1661 - protein, 41 aa, synthetic construct
  REGION 1..41: note = ATaRI peptide
ILQDNGNLRYVSFIIILVKLITANLYCVPATILVVLQSFFI

SEQ ID NO: 1662 - protein, 72 aa, synthetic construct
  REGION 1..72: note = ATaRI peptide
AAKEDEQMVRLFLLKPFYFPFFFLLSVFFFFFPIRVKCDIFLVKGLLCKKVFRFLINLYLQDLYILISYTSM

SEQ ID NO: 1663 - protein, 13 aa, synthetic construct
  REGION 1..13: note = ATaRI peptide
YSDSGAKGGKYTG

SEQ ID NO: 1664 - protein, 9 aa, synthetic construct
  REGION 1..9: note = ATaRI peptide
RATSQKASK

SEQ ID NO: 1665 - protein, 11 aa, synthetic construct
  REGION 1..11: note = ATaRI peptide
LPSRPAQRGEF

SEQ ID NO: 1666 - protein, 9 aa, synthetic construct
  REGION 1..9: note = ATaRI peptide
IISDPRQKE

SEQ ID NO: 1667 - protein, 41 aa, synthetic construct
  REGION 1..41: note = ATaRI peptide
PPTSTTGTGEGQKSRPALGDLRPGQGFRVPRTSARTELGLR

SEQ ID NO: 1668 - protein, 13 aa, synthetic construct
  REGION 1..13: note = ATaRI peptide
NSEKMSMEVCMYF

SEQ ID NO: 1669 - protein, 29 aa, synthetic construct
  REGION 1..29: note = ATaRI peptide
SVPAKPERRYLEHGCKLIFNCLGGVFLIY

SEQ ID NO: 1670 - protein, 17 aa, synthetic construct
  REGION 1..17: note = ATaRI peptide
GFLRNVEKGKLLIYDMF

SEQ ID NO: 1671 - protein, 11 aa, synthetic construct
  REGION 1..11: note = ATaRI peptide
KSKTPSQKVNE

SEQ ID NO: 1672 - protein, 27 aa, synthetic construct
  REGION 1..27: note = ATaRI peptide
HHENDVKTVSFEFMLFSFIVIFLTLEV

SEQ ID NO: 1673 - protein, 9 aa, synthetic construct
  REGION 1..9: note = ATaRI peptide
VQIGKCYYR

SEQ ID NO: 1674 - protein, 39 aa, synthetic construct
  REGION 1..39: note = ATaRI peptide
MRKGHVEQVSELAAACWAVCFLQRKAVMCGSITAYVILK

SEQ ID NO: 1675 - protein, 9 aa, synthetic construct
  REGION 1..9: note = ATaRI peptide
VKQYPPEFR

SEQ ID NO: 1676 - protein, 22 aa, synthetic construct
  REGION 1..22: note = ATaRI peptide
YENISLCQVSHLLPLESTRSLS

SEQ ID NO: 1677 - protein, 41 aa, synthetic construct
  REGION 1..41: note = ATaRI peptide
DVCLAPFPGSRFLCHPPLPHPAPYHCLAWARTPNLECITFS

SEQ ID NO: 1678 - protein, 9 aa, synthetic construct
  REGION 1..9: note = ATaRI peptide
RSQSLPKMV

SEQ ID NO: 1679 - protein, 43 aa, synthetic construct
  REGION 1..43: note = ATaRI peptide
RTSLEGYPGNSWGDCLDCVLCIFHECPGKVLLLLRRNLEMVFT

SEQ ID NO: 1680 - protein, 9 aa, synthetic construct
  REGION 1..9: note = ATaRI peptide
QNWLHSYFQ

SEQ ID NO: 1681 - protein, 22 aa, synthetic construct
  REGION 1..22: note = ATaRI peptide
VLFLPSAFVSLHFQLHSGSHGR

SEQ ID NO: 1682 - protein, 9 aa, synthetic construct
  REGION 1..9: note = ATaRI peptide
VDFNHKREM

SEQ ID NO: 1683 - protein, 27 aa, synthetic construct
  REGION 1..27: note = ATaRI peptide
KQRDEQLLSTYSFTSLLLLLFCNFLYI

SEQ ID NO: 1684 - protein, 19 aa, synthetic construct
  REGION 1..19: note = ATaRI peptide
LEPLPPHEVKKACAFLISS

SEQ ID NO: 1685 - protein, 9 aa, synthetic construct
  REGION 1..9: note = ATaRI peptide
APARGDPTG

SEQ ID NO: 1686 - protein, 19 aa, synthetic construct
  REGION 1..19: note = ATaRI peptide
QRSKETQEGRGLNCSGLGI

SEQ ID NO: 1687 - protein, 9 aa, synthetic construct
  REGION 1..9: note = ATaRI peptide
EALQSEKSR

SEQ ID NO: 1688 - protein, 38 aa, synthetic construct
  REGION 1..38: note = ATaRI peptide
HQLRSELQVRFMVVQLSRHHLPSGVNSLRGGETALLKR

SEQ ID NO: 1689 - protein, 9 aa, synthetic construct
  REGION 1..9: note = ATaRI peptide
EIQKLRNQV

SEQ ID NO: 1690 - protein, 34 aa, synthetic construct
  REGION 1..34: note = ATaRI peptide
MSGIDNGEGNQKRNLKRTFHSNMLLKSYRRTIFI

SEQ ID NO: 1691 - protein, 10 aa, synthetic construct
  REGION 1..10: note = ATaRI peptide
MVRLDISEGE

SEQ ID NO: 1692 - protein, 76 aa, synthetic construct
  REGION 1..76: note = ATaRI peptide
AGRPGAPTRSGQCAGQAPSAPGPGASLHEAEGFRRAGLGSGAPSAGVCLKVRAGLGRGVLPWSRVWAEGVVDFTGS

SEQ ID NO: 1693 - protein, 9 aa, synthetic construct
  REGION 1..9: note = ATaRI peptide
EEEEELQRR

SEQ ID NO: 1694 - protein, 15 aa, synthetic construct
  REGION 1..15: note = ATaRI peptide
IREISESKVRQLFCI

SEQ ID NO: 1695 - protein, 9 aa, synthetic construct
  REGION 1..9: note = ATaRI peptide
PAPKENPDK

SEQ ID NO: 1696 - protein, 45 aa, synthetic construct
  REGION 1..45: note = ATaRI peptide
LNRKGPTKGGRLSDTGTSVELVSWQNLALANTLCSLILTENRNLE

SEQ ID NO: 1697 - protein, 9 aa, synthetic construct
  REGION 1..9: note = ATaRI peptide
ETAVPATKR

SEQ ID NO: 1698 - protein, 9 aa, synthetic construct
  REGION 1..9: note = ATaRI peptide
AGHNDDVKW

SEQ ID NO: 1699 - protein, 18 aa, synthetic construct
  REGION 1..18: note = ATaRI peptide
EEKLADVKVMLQAFFGLH

SEQ ID NO: 1700 - protein, 15 aa, synthetic construct
  REGION 1..15: note = ATaRI peptide
YQKLRKTEVSHQGYC

SEQ ID NO: 1701 - protein, 9 aa, synthetic construct
  REGION 1..9: note = ATaRI peptide
LSVMRYSPG

SEQ ID NO: 1702 - protein, 60 aa, synthetic construct
  REGION 1..60: note = ATaRI peptide
CTLGFHVFGKFAADFTGSNKRVSPFKIFLQLLRSLMVTSLVRLLGCYGRPMRHTSCRTLG

SEQ ID NO: 1703 - protein, 54 aa, synthetic construct
  REGION 1..54: note = ATaRI peptide
NVPWRRLTVRTGLCLCLPGCDLPCSSCRVSRLCKNKEFSTSGNQMSIIWCSFII

SEQ ID NO: 1704 - protein, 16 aa, synthetic construct
  REGION 1..16: note = ATaRI peptide
QELLESLPGKSQGMSS

SEQ ID NO: 1705 - protein, 14 aa, synthetic construct
  REGION 1..14: note = ATaRI peptide
SSDEIICSRWLPGV

SEQ ID NO: 1706 - protein, 36 aa, synthetic construct
  REGION 1..36: note = ATaRI peptide
PLGLFQLDVSLIALSFSFSAFERKLLRVAVKCMCFS

SEQ ID NO: 1707 - protein, 19 aa, synthetic construct
  REGION 1..19: note = ATaRI peptide
RQRSGTEAGVCGLGDGVPR

SEQ ID NO: 1708 - protein, 68 aa, synthetic construct
  REGION 1..68: note = ATaRI peptide
RPAGSRAKVKDGLRAESLWVGGTSLGLLLPSPQRAQDFLSLVSKAQALCRSHCVPFHTSFCQEQRIIS

SEQ ID NO: 1709 - protein, 51 aa, synthetic construct
  REGION 1..51: note = ATaRI peptide
LEEKLTNPGNSFLAALPRKFAVGVPTFLTTSSNWMLPGRAEEPCVHPDLLL

SEQ ID NO: 1710 - protein, 14 aa, synthetic construct
  REGION 1..14: note = ATaRI peptide
ARKGSMRAGRLCLM

SEQ ID NO: 1711 - protein, 17 aa, synthetic construct
  REGION 1..17: note = ATaRI peptide
GMGTAYPQVSLREGGAV

SEQ ID NO: 1712 - protein, 25 aa, synthetic construct
  REGION 1..25: note = ATaRI peptide
GGSKPAVQVCSKSHPCVFTVLFRGP

SEQ ID NO: 1713 - protein, 32 aa, synthetic construct
  REGION 1..32: note = ATaRI peptide
EAEAEVSQVSVHLSPLTALCLQQQCLGRPGSA

SEQ ID NO: 1714 - protein, 21 aa, synthetic construct
  REGION 1..21: note = ATaRI peptide
GSLKSQNRVSNVSLSCDMEFN

SEQ ID NO: 1715 - protein, 12 aa, synthetic construct
  REGION 1..12: note = ATaRI peptide
KEDCLKLLCKLS

SEQ ID NO: 1716 - protein, 22 aa, synthetic construct
  REGION 1..22: note = ATaRI peptide
FGWSDRAKVRLFSHMCPVGGSL

SEQ ID NO: 1717 - protein, 31 aa, synthetic construct
  REGION 1..31: note = ATaRI peptide
IKFIQVAQVNNWFKTFGLGYKVNFLSPFPPA

SEQ ID NO: 1718 - protein, 9 aa, synthetic construct
  REGION 1..9: note = ATaRI peptide
CRLIDTTQM

SEQ ID NO: 1719 - protein, 39 aa, synthetic construct
  REGION 1..39: note = ATaRI peptide
CVAPTAFQVSLCGTFRGRRDKEEVLAIPGVPPHVLSSPS

SEQ ID NO: 1720 - protein, 13 aa, synthetic construct
  REGION 1..13: note = ATaRI peptide
GGVNDNFQVRLLL

SEQ ID NO: 1721 - protein, 29 aa, synthetic construct
  REGION 1..29: note = ATaRI peptide
LRNKGCSSCEYPSIFRAHRESGGIPPKTN

SEQ ID NO: 1722 - protein, 48 aa, synthetic construct
  REGION 1..48: note = ATaRI peptide
LRPDACGPVGTWLVRPGLACPGLPGPWAKARTLPDWAAALGSCSLFIP

SEQ ID NO: 1723 - protein, 9 aa, synthetic construct
  REGION 1..9: note = ATaRI peptide
KCPPTYPDV

SEQ ID NO: 1724 - protein, 46 aa, synthetic construct
  REGION 1..46: note = ATaRI peptide
LAKKHCGEVRFVKLELKEDSKLPHYTSNPILSSMFCVLLVLQKGTL

SEQ ID NO: 1725 - protein, 40 aa, synthetic construct
  REGION 1..40: note = ATaRI peptide
KRKEMAKQVPYQLHHNNLHFAKQSVFISTDDICVTISNTA

SEQ ID NO: 1726 - protein, 9 aa, synthetic construct
  REGION 1..9: note = ATaRI peptide
RANSSGRSR

SEQ ID NO: 1727 - protein, 16 aa, synthetic construct
  REGION 1..16: note = ATaRI peptide
AVHYLYIQVRSWCVVR

SEQ ID NO: 1728 - protein, 16 aa, synthetic construct
  REGION 1..16: note = ATaRI peptide
GLAYIHEKVNFTTFHI

SEQ ID NO: 1729 - protein, 39 aa, synthetic construct
  REGION 1..39: note = ATaRI peptide
FVLNQLRDVCIRCFSAYIFSNRNLSTEIRIQSRIFFWYL

SEQ ID NO: 1730 - protein, 11 aa, synthetic construct
  REGION 1..11: note = ATaRI peptide
DDGEHAKQVIF

SEQ ID NO: 1731 - protein, 15 aa, synthetic construct
  REGION 1..15: note = ATaRI peptide
VMLPFDLRVRLGTHC

SEQ ID NO: 1732 - protein, 99 aa, synthetic construct
  REGION 1..99: note = ATaRI peptide
IQEFPALQVPFHILTFQDSPLYFFTKCGGENHSYRPASQSVLQMNHIFTKVTEKSLLVLLLRFSSGSYLHRNWFCFGGWVFSAHSSKMQDIRLRFLRCS

SEQ ID NO: 1733 - protein, 11 aa, synthetic construct
  REGION 1..11: note = ATaRI peptide
YIILYDAVVSI

SEQ ID NO: 1734 - protein, 12 aa, synthetic construct
  REGION 1..12: note = ATaRI peptide
NLSLSSNSVSTF

SEQ ID NO: 1735 - protein, 36 aa, synthetic construct
  REGION 1..36: note = ATaRI peptide
DKEGSHVKVKTSEIFYNSIVRCYLWSTCLHTEARAV

SEQ ID NO: 1736 - protein, 9 aa, synthetic construct
  REGION 1..9: note = ATaRI peptide
KVTDERNGR

SEQ ID NO: 1737 - protein, 25 aa, synthetic construct
  REGION 1..25: note = ATaRI peptide
KGSFSNASGIITNYNLNIMMLICLL

SEQ ID NO: 1738 - protein, 18 aa, synthetic construct
  REGION 1..18: note = ATaRI peptide
TRRRYETQVHWVRVSLAF

SEQ ID NO: 1739 - protein, 32 aa, synthetic construct
  REGION 1..32: note = ATaRI peptide
ILQFLSLEVSNMNSSALWPLRSQIFAISLPKY

SEQ ID NO: 1740 - protein, 22 aa, synthetic construct
  REGION 1..22: note = ATaRI peptide
GQKIGHFQVSRVLLLTCTLQLG

SEQ ID NO: 1741 - protein, 13 aa, synthetic construct
  REGION 1..13: note = ATaRI peptide
CEKAVYVLVSASS

SEQ ID NO: 1742 - protein, 23 aa, synthetic construct
  REGION 1..23: note = ATaRI peptide
CTSNPCANGACCCPANLVDWPWG

SEQ ID NO: 1743 - protein, 55 aa, synthetic construct
  REGION 1..55: note = ATaRI peptide
ISRDELLQVCGELLENLCLDSACLLVWAGTILSFSKHLFNTCYVQSPVLVIRQRR

SEQ ID NO: 1744 - protein, 25 aa, synthetic construct
  REGION 1..25: note = ATaRI peptide
AESSAPEEGELSSLDLEGQLPLLSA

SEQ ID NO: 1745 - protein, 23 aa, synthetic construct
  REGION 1..23: note = ATaRI peptide
LTQIQESQVGDSVFLIVQRINLF

SEQ ID NO: 1746 - protein, 20 aa, synthetic construct
  REGION 1..20: note = ATaRI peptide
KTQLLKEKVRSCTRASFLIL

SEQ ID NO: 1747 - protein, 11 aa, synthetic construct
  REGION 1..11: note = ATaRI peptide
LFVSFESKVRL

SEQ ID NO: 1748 - protein, 44 aa, synthetic construct
  REGION 1..44: note = ATaRI peptide
YTPKPNPVVSLEFNLLLQVTKVMCKDGVFQADFWLIFCESFCFQ

SEQ ID NO: 1749 - protein, 34 aa, synthetic construct
  REGION 1..34: note = ATaRI peptide
PENHNNAKVSFLLHKFFLTSDYLFLVLRFVLLSE

SEQ ID NO: 1750 - protein, 14 aa, synthetic construct
  REGION 1..14: note = ATaRI peptide
SKSLILTRVSVLCK

SEQ ID NO: 1751 - protein, 11 aa, synthetic construct
  REGION 1..11: note = ATaRI peptide
AGSAVALPGML

SEQ ID NO: 1752 - protein, 9 aa, synthetic construct
  REGION 1..9: note = ATaRI peptide
DIASVTEAR

SEQ ID NO: 1753 - protein, 13 aa, synthetic construct
  REGION 1..13: note = ATaRI peptide
LSHWEMSRVSRHC

SEQ ID NO: 1754 - protein, 16 aa, synthetic construct
  REGION 1..16: note = ATaRI peptide
LLEQTPCSGIRNIRTT

SEQ ID NO: 1755 - protein, 10 aa, synthetic construct
  REGION 1..10: note = ATaRI peptide
LLRSKKRKVK

SEQ ID NO: 1756 - protein, 23 aa, synthetic construct
  REGION 1..23: note = ATaRI peptide
LAANLKKMVSINIAIFSYFLLET

SEQ ID NO: 1757 - protein, 31 aa, synthetic construct
  REGION 1..31: note = ATaRI peptide
INKPRVNEVRPFQKSWSGIVYTKLSLFFFLS

SEQ ID NO: 1758 - protein, 30 aa, synthetic construct
  REGION 1..30: note = ATaRI peptide
LVLQNELKVGVLGGLSCSLHHLGAPPLFRS

SEQ ID NO: 1759 - protein, 40 aa, synthetic construct
  REGION 1..40: note = ATaRI peptide
WISQQIKESRCPPLNVSASPPYSFIFMLPQPSVFSLLFSL

SEQ ID NO: 1760 - protein, 12 aa, synthetic construct
  REGION 1..12: note = ATaRI peptide
SKHMPQLHRYSQ

SEQ ID NO: 1761 - protein, 15 aa, synthetic construct
  REGION 1..15: note = ATaRI peptide
KLALHLSEVNNIVLG

SEQ ID NO: 1762 - protein, 32 aa, synthetic construct
  REGION 1..32: note = ATaRI peptide
PGTSGVACRYCPAQSAGTRERRRGDLSQRLGE

SEQ ID NO: 1763 - protein, 57 aa, synthetic construct
  REGION 1..57: note = ATaRI peptide
VEQIKSQKVRTFLIPFALLSTEGILLINFALHYFSKTLVFSSFYLFIHLTISAWLSC

SEQ ID NO: 1764 - protein, 9 aa, synthetic construct
  REGION 1..9: note = ATaRI peptide
PPVRSALEK

SEQ ID NO: 1765 - protein, 15 aa, synthetic construct
  REGION 1..15: note = ATaRI peptide
QLRELQDLVRAQKVA

SEQ ID NO: 1766 - protein, 11 aa, synthetic construct
  REGION 1..11: note = ATaRI peptide
GQVGLCDLVSY

SEQ ID NO: 1767 - protein, 16 aa, synthetic construct
  REGION 1..16: note = ATaRI peptide
FSRAIFEEVNVNVFTC

SEQ ID NO: 1768 - protein, 18 aa, synthetic construct
  REGION 1..18: note = ATaRI peptide
RRKSQVNGGLLIFRYCFI

SEQ ID NO: 1769 - protein, 21 aa, synthetic construct
  REGION 1..21: note = ATaRI peptide
EFSLVLDLVSILSVEVERIKG

SEQ ID NO: 1770 - protein, 19 aa, synthetic construct
  REGION 1..19: note = ATaRI peptide
LALPRFYQVSKKANCSQHC

SEQ ID NO: 1771 - protein, 12 aa, synthetic construct
  REGION 1..12: note = ATaRI peptide
LMRKKLDPVGAK

SEQ ID NO: 1772 - protein, 9 aa, synthetic construct
  REGION 1..9: note = ATaRI peptide
CTDRGTCAW

SEQ ID NO: 1773 - protein, 25 aa, synthetic construct
  REGION 1..25: note = ATaRI peptide
KHNAAFCYKLVSTVPLGHLGPLSLH

SEQ ID NO: 1774 - protein, 64 aa, synthetic construct
  REGION 1..64: note = ATaRI peptide
HKVLVCGAGKKQKPPCCGFIDWEFREPSAHLIPPPRLEICSRILLGKGGLQCPIPSVTSTLLNK

SEQ ID NO: 1775 - protein, 14 aa, synthetic construct
  REGION 1..14: note = ATaRI peptide
HALLHSEKVRSVNL

SEQ ID NO: 1776 - protein, 20 aa, synthetic construct
  REGION 1..20: note = ATaRI peptide
MKGQTTGKVLAPSFILSPTS

SEQ ID NO: 1777 - protein, 17 aa, synthetic construct
  REGION 1..17: note = ATaRI peptide
DVKLKLKQVRQIIYLIQ

SEQ ID NO: 1778 - protein, 10 aa, synthetic construct
  REGION 1..10: note = ATaRI peptide
DLRNLCTEVS

SEQ ID NO: 1779 - protein, 45 aa, synthetic construct
  REGION 1..45: note = ATaRI peptide
SFLAEEGTVGSIPSRNHSEIPSGKIYMEKKALRAPGCLVMDSLLY

SEQ ID NO: 1780 - protein, 29 aa, synthetic construct
  REGION 1..29: note = ATaRI peptide
LRKNKNLRVIIIFKFPIILQECYILKYGF

SEQ ID NO: 1781 - protein, 11 aa, synthetic construct
  REGION 1..11: note = ATaRI peptide
PSIKNVPQVCS

SEQ ID NO: 1782 - protein, 15 aa, synthetic construct
  REGION 1..15: note = ATaRI peptide
TPTVNRENKYVYLNS

SEQ ID NO: 1783 - protein, 21 aa, synthetic construct
  REGION 1..21: note = ATaRI peptide
ITALTSKHVGARRPGSSGTSE

SEQ ID NO: 1784 - protein, 9 aa, synthetic construct
  REGION 1..9: note = ATaRI peptide
GLLGKDDQR

SEQ ID NO: 1785 - protein, 9 aa, synthetic construct
  REGION 1..9: note = ATaRI peptide
NLSLLDFIR

SEQ ID NO: 1786 - protein, 10 aa, synthetic construct
  REGION 1..10: note = ATaRI peptide
RLHIIEIIGL

SEQ ID NO: 1787 - protein, 13 aa, synthetic construct
  REGION 1..13: note = ATaRI peptide
EIFFQPSQGTLKK

SEQ ID NO: 1788 - protein, 9 aa, synthetic construct
  REGION 1..9: note = ATaRI peptide
DTELYDLAG

SEQ ID NO: 1789 - protein, 21 aa, synthetic construct
  REGION 1..21: note = ATaRI peptide
EVNLNNIKVFHCDYHQSVNLS

SEQ ID NO: 1790 - protein, 44 aa, synthetic construct
  REGION 1..44: note = ATaRI peptide
NRYKGGIRGESCMEITFHHFGILDFILALDVIRLPSHWTFFFFF

SEQ ID NO: 1791 - protein, 26 aa, synthetic construct
  REGION 1..26: note = ATaRI peptide
NQEVARWVVSPKYFRSCMPVISFLWV

SEQ ID NO: 1792 - protein, 9 aa, synthetic construct
  REGION 1..9: note = ATaRI peptide
LEGSKSMNR

SEQ ID NO: 1793 - protein, 9 aa, synthetic construct
  REGION 1..9: note = ATaRI peptide
ILHHFLPVG

SEQ ID NO: 1794 - protein, 13 aa, synthetic construct
  REGION 1..13: note = ATaRI peptide
TVMAAAPAGTTLL

SEQ ID NO: 1795 - protein, 48 aa, synthetic construct
  REGION 1..48: note = ATaRI peptide
FASTFFMQGKYYQTIAKYYCSHLYISQYFKVLGKRIPIFRPYLGIFFG

SEQ ID NO: 1796 - protein, 146 aa, synthetic construct
  REGION 1..146: note = ATaRI peptide
INGSDSILGELFELAKLPKSLWTFSDPDIFIYIYVCFIYINVIYMYICYICICVLYVYMCYICIYVCIYVIYVYVLYMYMCVFYICIYRYICIYVCVYMYICIYMCIYVCVYICMLFVCLRQSLSLSPRLECSGTVMAHCSLNLQG

SEQ ID NO: 1797 - protein, 17 aa, synthetic construct
  REGION 1..17: note = ATaRI peptide
HKTQENYRGNYIVGFQK

SEQ ID NO: 1798 - protein, 46 aa, synthetic construct
  REGION 1..46: note = ATaRI peptide
GSAQGNNQVNGSFVFCRVHLAWNVVNNLLFLQSVCLFIAVSGKLPE

SEQ ID NO: 1799 - protein, 23 aa, synthetic construct
  REGION 1..23: note = ATaRI peptide
ENELEAAQVNTKGCCHYSLKKNA

SEQ ID NO: 1800 - protein, 13 aa, synthetic construct
  REGION 1..13: note = ATaRI peptide
RISRSREQVLFYR

SEQ ID NO: 1801 - protein, 24 aa, synthetic construct
  REGION 1..24: note = ATaRI peptide
AAASTQAQVKTSVLSLKCDDHGWV

SEQ ID NO: 1802 - protein, 12 aa, synthetic construct
  REGION 1..12: note = ATaRI peptide
VDLTVDEDGKLK

SEQ ID NO: 1803 - protein, 25 aa, synthetic construct
  REGION 1..25: note = ATaRI peptide
GPFRGNFEVCNKINEYVCHSIFNAD

SEQ ID NO: 1804 - protein, 9 aa, synthetic construct
  REGION 1..9: note = ATaRI peptide
LEESVSPKK

SEQ ID NO: 1805 - protein, 22 aa, synthetic construct
  REGION 1..22: note = ATaRI peptide
NETDERFQVRYLQAYSHGKKSK

SEQ ID NO: 1806 - protein, 18 aa, synthetic construct
  REGION 1..18: note = ATaRI peptide
ARMVEAAKVFYWICLYEK

SEQ ID NO: 1807 - protein, 33 aa, synthetic construct
  REGION 1..33: note = ATaRI peptide
ISSQNFLQVTGLWSPWAHSEPSSGQGLPFKERS

SEQ ID NO: 1808 - protein, 16 aa, synthetic construct
  REGION 1..16: note = ATaRI peptide
ELRTASQKASGACHRG

SEQ ID NO: 1809 - protein, 11 aa, synthetic construct
  REGION 1..11: note = ATaRI peptide
LKPLPGETVSC

SEQ ID NO: 1810 - protein, 15 aa, synthetic construct
  REGION 1..15: note = ATaRI peptide
DNALRELEVGPWEGC

SEQ ID NO: 1811 - protein, 14 aa, synthetic construct
  REGION 1..14: note = ATaRI peptide
ESVMENSKVRLPMP

SEQ ID NO: 1812 - protein, 11 aa, synthetic construct
  REGION 1..11: note = ATaRI peptide
GLTEAAAQVRG

SEQ ID NO: 1813 - protein, 20 aa, synthetic construct
  REGION 1..20: note = ATaRI peptide
TRDDISVEVSWESGGLLSRL

SEQ ID NO: 1814 - protein, 44 aa, synthetic construct
  REGION 1..44: note = ATaRI peptide
AIAEAMSKVGMGSRALYSLISLTHGPRVLFSKLSRLIATSLFFS

SEQ ID NO: 1815 - protein, 24 aa, synthetic construct
  REGION 1..24: note = ATaRI peptide
NSETFADHRYVGVLDGERFRLACP

SEQ ID NO: 1816 - protein, 22 aa, synthetic construct
  REGION 1..22: note = ATaRI peptide
GSDDPETQVPAGPGECVLPVFP

SEQ ID NO: 1817 - protein, 19 aa, synthetic construct
  REGION 1..19: note = ATaRI peptide
SDMLTACKVKSLAWFWMDR

SEQ ID NO: 1818 - protein, 12 aa, synthetic construct
  REGION 1..12: note = ATaRI peptide
TAYYRGAMVSVL

SEQ ID NO: 1819 - protein, 21 aa, synthetic construct
  REGION 1..21: note = ATaRI peptide
KPQPTYEEVRICALGLIAFRY

SEQ ID NO: 1820 - protein, 50 aa, synthetic construct
  REGION 1..50: note = ATaRI peptide
VAYKVTTQVSPGDPADDHLHRLWCLYQGHHSDYFWVSPLFLCQHLHVYSR

SEQ ID NO: 1821 - protein, 34 aa, synthetic construct
  REGION 1..34: note = ATaRI peptide
PPPEKSLIGKPVVFHSTWIVFLCILSKIHSLFSI

SEQ ID NO: 1822 - protein, 9 aa, synthetic construct
  REGION 1..9: note = ATaRI peptide
EKRRAALER

SEQ ID NO: 1823 - protein, 47 aa, synthetic construct
  REGION 1..47: note = ATaRI peptide
TLLYSQQQVCKLCVTFILYCLLQRPAASSGLLQQDVQALLLRGWALL

SEQ ID NO: 1824 - protein, 49 aa, synthetic construct
  REGION 1..49: note = ATaRI peptide
KTPFDLAKVSAYRLKLFLTIGEEEVTNTFQRAKCTNWSRMAIFQQMHEF

SEQ ID NO: 1825 - protein, 20 aa, synthetic construct
  REGION 1..20: note = ATaRI peptide
KLLEFDRTRYERVRITNAKK

SEQ ID NO: 1826 - protein, 9 aa, synthetic construct
  REGION 1..9: note = ATaRI peptide
NSLAEYHSR

SEQ ID NO: 1827 - protein, 69 aa, synthetic construct
  REGION 1..69: note = ATaRI peptide
AVMMQNYPGTAPSASTIPFTGRGNEAQISHPEFSCSAPRHIEARLDDGPFFTESFCEVATITHSSLNDP

SEQ ID NO: 1828 - protein, 15 aa, synthetic construct
  REGION 1..15: note = ATaRI peptide
AEMELRAKVSKDPRI

SEQ ID NO: 1829 - protein, 29 aa, synthetic construct
  REGION 1..29: note = ATaRI peptide
LWSAIEIFRWVEMPGWCLNAAPCLQQLCS

SEQ ID NO: 1830 - protein, 54 aa, synthetic construct
  REGION 1..54: note = ATaRI peptide
LQDNKKLKVGAVWSLPSGDTAGSQWMITGPGYCGPVLGTLAVLRPRKLLGALPG

SEQ ID NO: 1831 - protein, 36 aa, synthetic construct
  REGION 1..36: note = ATaRI peptide
QKENPGGQVGTQPWHRQNWRGLGKELLTKNTSSLKV

SEQ ID NO: 1832 - protein, 94 aa, synthetic construct
  REGION 1..94: note = ATaRI peptide
TVPDVRRQVSVPICISDSLSPAGLWGLSACGAHTQEEEEARDNQLIRAPPLRSGKGLKPWRGTMCLGDIPLGLGGPRSHALYSHCYKQHTLVPL

SEQ ID NO: 1833 - protein, 33 aa, synthetic construct
  REGION 1..33: note = ATaRI peptide
ESMEKWQTRYGPDLLLFSHCRLLSFPHHWLFGS

SEQ ID NO: 1834 - protein, 16 aa, synthetic construct
  REGION 1..16: note = ATaRI peptide
GVFVITFKVFPDIVYV

SEQ ID NO: 1835 - protein, 12 aa, synthetic construct
  REGION 1..12: note = ATaRI peptide
SGLVMARKVSLP

SEQ ID NO: 1836 - protein, 12 aa, synthetic construct
  REGION 1..12: note = ATaRI peptide
ILGKVSIAVSML

SEQ ID NO: 1837 - protein, 60 aa, synthetic construct
  REGION 1..60: note = ATaRI peptide
ELASLNHLVSLFFYSKIGFSFIQSFCVQLLTANNMLATVLGPGKWINKTVSARSYYCLVR

SEQ ID NO: 1838 - protein, 23 aa, synthetic construct
  REGION 1..23: note = ATaRI peptide
VKGWGAEYRSVMGAAYIRGPNSR

SEQ ID NO: 1839 - protein, 41 aa, synthetic construct
  REGION 1..41: note = ATaRI peptide
FWFNDRRGRYEHGHGCIFYRSGENRRPQDVLNLLIAGIKSI

SEQ ID NO: 1840 - protein, 68 aa, synthetic construct
  REGION 1..68: note = ATaRI peptide
CDFGVSTQVCLFSSQCTVFSATTPLYFHSVLWIEKSPSCQTNRNSASFPHLGVCYSFLISERVSFIRI

SEQ ID NO: 1841 - protein, 20 aa, synthetic construct
  REGION 1..20: note = ATaRI peptide
PYEHLIIDGYVTLSVFGTLK

SEQ ID NO: 1842 - protein, 17 aa, synthetic construct
  REGION 1..17: note = ATaRI peptide
NVKQFIAPGKLCIICAC

SEQ ID NO: 1843 - protein, 10 aa, synthetic construct
  REGION 1..10: note = ATaRI peptide
GAVNLFSLGM

SEQ ID NO: 1844 - protein, 10 aa, synthetic construct
  REGION 1..10: note = ATaRI peptide
MQKINGTEVS

SEQ ID NO: 1845 - protein, 9 aa, synthetic construct
  REGION 1..9: note = ATaRI peptide
LISILGDAR

SEQ ID NO: 1846 - protein, 49 aa, synthetic construct
  REGION 1..49: note = ATaRI peptide
IMEEGMGQVKISSCFSVFVEFPIVLRPLHKFAQIKTGEALCVMILDSNN

SEQ ID NO: 1847 - protein, 18 aa, synthetic construct
  REGION 1..18: note = ATaRI peptide
WHDPVKCKVSLSDISIFK

SEQ ID NO: 1848 - protein, 9 aa, synthetic construct
  REGION 1..9: note = ATaRI peptide
PWEPHGSAW

SEQ ID NO: 1849 - protein, 9 aa, synthetic construct
  REGION 1..9: note = ATaRI peptide
QKFNLYIYR

SEQ ID NO: 1850 - protein, 24 aa, synthetic construct
  REGION 1..24: note = ATaRI peptide
CEYAIYVQGKTHTSCLLAREIHFS

SEQ ID NO: 1851 - protein, 9 aa, synthetic construct
  REGION 1..9: note = ATaRI peptide
NLKQVARSL

SEQ ID NO: 1852 - protein, 19 aa, synthetic construct
  REGION 1..19: note = ATaRI peptide
TYDPTNYKVLQAVKALAFI

SEQ ID NO: 1853 - protein, 19 aa, synthetic construct
  REGION 1..19: note = ATaRI peptide
SSLEFDSEVCLLLAPKSHK

SEQ ID NO: 1854 - protein, 29 aa, synthetic construct
  REGION 1..29: note = ATaRI peptide
SLEVRNSKVKLYDAAVHFYWYTVAPQRGL

SEQ ID NO: 1855 - protein, 15 aa, synthetic construct
  REGION 1..15: note = ATaRI peptide
SAVTRPHTGKVSYLS

SEQ ID NO: 1856 - protein, 40 aa, synthetic construct
  REGION 1..40: note = ATaRI peptide
AVQFRTPKGNAPQAEGFVVCLFSGAMLTLSLEHIESVDSI

SEQ ID NO: 1857 - protein, 10 aa, synthetic construct
  REGION 1..10: note = ATaRI peptide
SDKMPNDQGK

SEQ ID NO: 1858 - protein, 21 aa, synthetic construct
  REGION 1..21: note = ATaRI peptide
GALWFCLTGEGSSMGTGGEGQ

SEQ ID NO: 1859 - protein, 12 aa, synthetic construct
  REGION 1..12: note = ATaRI peptide
AHGSVTITGKGR

SEQ ID NO: 1860 - protein, 38 aa, synthetic construct
  REGION 1..38: note = ATaRI peptide
DIDGTTYAGEALELWGRPTWPQLATGQLCGWPCLLPSV

SEQ ID NO: 1861 - protein, 65 aa, synthetic construct
  REGION 1..65: note = ATaRI peptide
YQLCHALRCKCPPSKEAWAATCLQPSHLVTCCPHSFQHVTNHSPGPEGHQIPFGGKACLWVGISV

SEQ ID NO: 1862 - protein, 23 aa, synthetic construct
  REGION 1..23: note = ATaRI peptide
EEEEEMAEVGILYKRRVHKFLHF

SEQ ID NO: 1863 - protein, 29 aa, synthetic construct
  REGION 1..29: note = ATaRI peptide
YRSQSYKTGKDLWIPALFMILLLFSIVRL

SEQ ID NO: 1864 - protein, 30 aa, synthetic construct
  REGION 1..30: note = ATaRI peptide
DSDGFLTESKDCPTRLTMETNTNMLSSGVC

SEQ ID NO: 1865 - protein, 28 aa, synthetic construct
  REGION 1..28: note = ATaRI peptide
AEEESFRKVSSCAQAVSFDHVSSLYLPA

SEQ ID NO: 1866 - protein, 14 aa, synthetic construct
  REGION 1..14: note = ATaRI peptide
PEEVDYMTVRKKHF

SEQ ID NO: 1867 - protein, 9 aa, synthetic construct
  REGION 1..9: note = ATaRI peptide
ARVLLQDFT

SEQ ID NO: 1868 - protein, 29 aa, synthetic construct
  REGION 1..29: note = ATaRI peptide
SLQIDFSKWYFNADIYRQPCKLIGWKCVM

SEQ ID NO: 1869 - protein, 23 aa, synthetic construct
  REGION 1..23: note = ATaRI peptide
FQACLNEKVGYFILIRVFQPALC

SEQ ID NO: 1870 - protein, 9 aa, synthetic construct
  REGION 1..9: note = ATaRI peptide
VLPYLSKLG

SEQ ID NO: 1871 - protein, 15 aa, synthetic construct
  REGION 1..15: note = ATaRI peptide
KALKDKIEVRVLCVS

SEQ ID NO: 1872 - protein, 9 aa, synthetic construct
  REGION 1..9: note = ATaRI peptide
KSRGNTDNK

SEQ ID NO: 1873 - protein, 43 aa, synthetic construct
  REGION 1..43: note = ATaRI peptide
MVLMNDWSGNYWSSAPVEMTGRRLGTWGNFIEAEDLVQVKSGR

SEQ ID NO: 1874 - protein, 18 aa, synthetic construct
  REGION 1..18: note = ATaRI peptide
TICKSNFKVSFDADQTAF

SEQ ID NO: 1875 - protein, 64 aa, synthetic construct
  REGION 1..64: note = ATaRI peptide
SRRDFRPEVGVSHNSVFLVAFLSGCRRDFSSKFKPKETGVRTEAWVSASVGEQRSDTWGGVRRQ

SEQ ID NO: 1876 - protein, 29 aa, synthetic construct
  REGION 1..29: note = ATaRI peptide
RRSFICRMRSVLGEQQAIRWLVCSFFCHR

SEQ ID NO: 1877 - protein, 9 aa, synthetic construct
  REGION 1..9: note = ATaRI peptide
TYCFDAFPR

SEQ ID NO: 1878 - protein, 37 aa, synthetic construct
  REGION 1..37: note = ATaRI peptide
EADARLRQVSEARSPAFVRASMAWDTVGGSPGAESPG

SEQ ID NO: 1879 - protein, 31 aa, synthetic construct
  REGION 1..31: note = ATaRI peptide
TLCKLDILVCFFKIFTLSDLLFVINYFFIYT

SEQ ID NO: 1880 - protein, 16 aa, synthetic construct
  REGION 1..16: note = ATaRI peptide
KETVKALAGDNLKNAI

SEQ ID NO: 1881 - protein, 11 aa, synthetic construct
  REGION 1..11: note = ATaRI peptide
DSLKRLIKGKI

SEQ ID NO: 1882 - protein, 19 aa, synthetic construct
  REGION 1..19: note = ATaRI peptide
SLESFSCPGNPLEFCPCSP

SEQ ID NO: 1883 - protein, 32 aa, synthetic construct
  REGION 1..32: note = ATaRI peptide
SLRRCLTGRLVVASLAPACGMCQCLWMGGEER

SEQ ID NO: 1884 - protein, 39 aa, synthetic construct
  REGION 1..39: note = ATaRI peptide
RYKTCSNHVSHKIKLFYPIQYVLVLSYNIPMCTLKLMVS

SEQ ID NO: 1885 - protein, 11 aa, synthetic construct
  REGION 1..11: note = ATaRI peptide
KSHVSPEKSRF

SEQ ID NO: 1886 - protein, 10 aa, synthetic construct
  REGION 1..10: note = ATaRI peptide
LMADFIFKVG

SEQ ID NO: 1887 - protein, 18 aa, synthetic construct
  REGION 1..18: note = ATaRI peptide
PCTVTCGGGEAQALFMNI

SEQ ID NO: 1888 - protein, 9 aa, synthetic construct
  REGION 1..9: note = ATaRI peptide
YDHFQPLPR

SEQ ID NO: 1889 - protein, 43 aa, synthetic construct
  REGION 1..43: note = ATaRI peptide
WIAMEWSQVRFENMPLLINSHILRDIFYMPTMVLDSMETKKKW

SEQ ID NO: 1890 - protein, 62 aa, synthetic construct
  REGION 1..62: note = ATaRI peptide
PIPCYKPKGKSVVHCKFKSNGIFQLPFQYCSISLSTYYFLIKIVLLTDCNRPSHLDKEVRYM

SEQ ID NO: 1891 - protein, 9 aa, synthetic construct
  REGION 1..9: note = ATaRI peptide
TRIATEEPT

SEQ ID NO: 1892 - protein, 10 aa, synthetic construct
  REGION 1..10: note = ATaRI peptide
PCTATCVGGI

SEQ ID NO: 1893 - protein, 118 aa, synthetic construct
  REGION 1..118: note = ATaRI peptide
CNTEPCPPRYVLSCVPGIYRVRVVTPSLQRNPPKCRLVASPKVDVLSLLQSSLCSSYAPARFLPRCSDAAMLHRNALQADFCLHRTRMNINWPATHKTMRSVDLFSFSSLFPPGHFFP

SEQ ID NO: 1894 - protein, 42 aa, synthetic construct
  REGION 1..42: note = ATaRI peptide
SCQMPECSSKYAVSALHQDMLILFILSRCLYFPYVNRFLICG

SEQ ID NO: 1895 - protein, 9 aa, synthetic construct
  REGION 1..9: note = ATaRI peptide
GTLLQPSVK

SEQ ID NO: 1896 - protein, 74 aa, synthetic construct
  REGION 1..74: note = ATaRI peptide
VTIRCPVKGKCGHFSGRPFQWEVSVAIPVLPGNTSWHFGIRDLSLIGLKKRFSSTLTVDLTLKGEVILAHETDV

SEQ ID NO: 1897 - protein, 12 aa, synthetic construct
  REGION 1..12: note = ATaRI peptide
PTGEPPPQGLGF

SEQ ID NO: 1898 - protein, 9 aa, synthetic construct
  REGION 1..9: note = ATaRI peptide
CNIRDCPAR

SEQ ID NO: 1899 - protein, 9 aa, synthetic construct
  REGION 1..9: note = ATaRI peptide
DSNCDDRKR

SEQ ID NO: 1900 - protein, 9 aa, synthetic construct
  REGION 1..9: note = ATaRI peptide
TVKKFYTCG

SEQ ID NO: 1901 - protein, 55 aa, synthetic construct
  REGION 1..55: note = ATaRI peptide
PPGGHSPQVSVGSLPIGAGCSVRLGAGRALGRLLLWPWNNQSDSFPQCGSLSSPV

SEQ ID NO: 1902 - protein, 12 aa, synthetic construct
  REGION 1..12: note = ATaRI peptide
SFLVTDLAGTRV

SEQ ID NO: 1903 - protein, 9 aa, synthetic construct
  REGION 1..9: note = ATaRI peptide
TVIVGVVRR

SEQ ID NO: 1904 - protein, 17 aa, synthetic construct
  REGION 1..17: note = ATaRI peptide
TIEAPITKVKQFVVCLH

SEQ ID NO: 1905 - protein, 31 aa, synthetic construct
  REGION 1..31: note = ATaRI peptide
STESLTDEGKRKLWPLFYASVGTVCVSLPRT

SEQ ID NO: 1906 - protein, 13 aa, synthetic construct
  REGION 1..13: note = ATaRI peptide
QRILQCTKGKSPF

SEQ ID NO: 1907 - protein, 10 aa, synthetic construct
  REGION 1..10: note = ATaRI peptide
SHQMNASKGK

SEQ ID NO: 1908 - protein, 26 aa, synthetic construct
  REGION 1..26: note = ATaRI peptide
ESDSGLKKVFLFKIHHEPPWHFPLNS

SEQ ID NO: 1909 - protein, 9 aa, synthetic construct
  REGION 1..9: note = ATaRI peptide
FQNLCDITR

SEQ ID NO: 1910 - protein, 16 aa, synthetic construct
  REGION 1..16: note = ATaRI peptide
KICKENSRGKFTAMFS

SEQ ID NO: 1911 - protein, 50 aa, synthetic construct
  REGION 1..50: note = ATaRI peptide
QAALPHPQGKAVPRAWASACPSCHFFIQYFPKSQMGPFRWSPSFIVTYLF

SEQ ID NO: 1912 - protein, 34 aa, synthetic construct
  REGION 1..34: note = ATaRI peptide
ELSVDEAACKKREILWVQLGLLPLFPIINSIVMI

SEQ ID NO: 1913 - protein, 30 aa, synthetic construct
  REGION 1..30: note = ATaRI peptide
SDKQQKRQVNIVWIEAARVCIYPFESHAVI

SEQ ID NO: 1914 - protein, 23 aa, synthetic construct
  REGION 1..23: note = ATaRI peptide
NIEEENCQRWVSRVKGINPLRSC

SEQ ID NO: 1915 - protein, 12 aa, synthetic construct
  REGION 1..12: note = ATaRI peptide
AGEDELLKVRIS

SEQ ID NO: 1916 - protein, 9 aa, synthetic construct
  REGION 1..9: note = ATaRI peptide
LSQSYQKFR

SEQ ID NO: 1917 - protein, 89 aa, synthetic construct
  REGION 1..89: note = ATaRI peptide
QTREFVEKGKHPVMTAASGCTLFQMLQPDSSNSLNANLPTRQNKNNLASCSRLSSQHFGRLSWVDHLSPGVQDQLGQHSETPSVQKIQK

SEQ ID NO: 1918 - protein, 11 aa, synthetic construct
  REGION 1..11: note = ATaRI peptide
YEILLKDKVCN

SEQ ID NO: 1919 - protein, 53 aa, synthetic construct
  REGION 1..53: note = ATaRI peptide
HRIGQKKQVSMERLLEIALGLGARGLVQPFQDVNKMLFPCFAFISPEALISVC

SEQ ID NO: 1920 - protein, 30 aa, synthetic construct
  REGION 1..30: note = ATaRI peptide
EGEESEPQVINNEEREIFLRSMICESLTFL

SEQ ID NO: 1921 - protein, 11 aa, synthetic construct
  REGION 1..11: note = ATaRI peptide
RIRSSTKKVIK

SEQ ID NO: 1922 - protein, 9 aa, synthetic construct
  REGION 1..9: note = ATaRI peptide
PSEEGEVKV

SEQ ID NO: 1923 - protein, 22 aa, synthetic construct
  REGION 1..22: note = ATaRI peptide
GDQRYKSKVSSIFSIRRTVSLK

SEQ ID NO: 1924 - protein, 9 aa, synthetic construct
  REGION 1..9: note = ATaRI peptide
PEWNKVFTL

SEQ ID NO: 1925 - protein, 78 aa, synthetic construct
  REGION 1..78: note = ATaRI peptide
DSRKLSKKVGRYSRWLVDWYTQHPAAEVLTLACNFFLETFPPSYSSSLPLAPSLHLFLLVPFSPKIRRSVSSHKKGKT

SEQ ID NO: 1926 - protein, 15 aa, synthetic construct
  REGION 1..15: note = ATaRI peptide
VSSIQDSQVSKDSEF

SEQ ID NO: 1927 - protein, 35 aa, synthetic construct
  REGION 1..35: note = ATaRI peptide
DVNTPALLVSSSFFSSSSFSSFPPFLLPFNSGIYI

SEQ ID NO: 1928 - protein, 10 aa, synthetic construct
  REGION 1..10: note = ATaRI peptide
RNNGERASCE

SEQ ID NO: 1929 - protein, 9 aa, synthetic construct
  REGION 1..9: note = ATaRI peptide
SFTVYYKEA

SEQ ID NO: 1930 - protein, 27 aa, synthetic construct
  REGION 1..27: note = ATaRI peptide
RSLRPEMEVSFHFHRYCMLPGLLSFPL

SEQ ID NO: 1931 - protein, 53 aa, synthetic construct
  REGION 1..53: note = ATaRI peptide
EDFTVKIGGVSLAFQVWARTKLRCFEDFVGISLPLERFSSVSLECTDSFLGMM

SEQ ID NO: 1932 - protein, 68 aa, synthetic construct
  REGION 1..68: note = ATaRI peptide
VFTTYSDVWYENLYCIASLEPPASALSTSSVSRALSFSVHCYPLPALAQCCVSHTSSSLRCSCCQWAS

SEQ ID NO: 1933 - protein, 29 aa, synthetic construct
  REGION 1..29: note = ATaRI peptide
GIQAEERQVRARGWRADPIPAAVAPAPCP

SEQ ID NO: 1934 - protein, 9 aa, synthetic construct
  REGION 1..9: note = ATaRI peptide
LSLEVATYR

SEQ ID NO: 1935 - protein, 36 aa, synthetic construct
  REGION 1..36: note = ATaRI peptide
HTYHSLLKGTWDFWFSYFSLSFSEHCAWCTCFGVHL

SEQ ID NO: 1936 - protein, 21 aa, synthetic construct
  REGION 1..21: note = ATaRI peptide
MMRNHKIAVSTKVWFVLLSCA

SEQ ID NO: 1937 - protein, 21 aa, synthetic construct
  REGION 1..21: note = ATaRI peptide
RQTAFLEQVKYWGLNGTFTFD

SEQ ID NO: 1938 - protein, 13 aa, synthetic construct
  REGION 1..13: note = ATaRI peptide
EGLSNCNTGKRIF

SEQ ID NO: 1939 - protein, 38 aa, synthetic construct
  REGION 1..38: note = ATaRI peptide
GAGATPDTGEKRARPQQELRGAGPEKAGRGREGAGSAE

SEQ ID NO: 1940 - protein, 25 aa, synthetic construct
  REGION 1..25: note = ATaRI peptide
IMGLEGEQVIAGYRTQEIILLRQTL

SEQ ID NO: 1941 - protein, 9 aa, synthetic construct
  REGION 1..9: note = ATaRI peptide
DQNDSSVFE

SEQ ID NO: 1942 - protein, 68 aa, synthetic construct
  REGION 1..68: note = ATaRI peptide
TVHFFYNEVSNCQRGTCGCKATRGFFFFFLRQRLISGWSCVCLQSSYMLVMIFMATLLTLACLKNFFN

SEQ ID NO: 1943 - protein, 43 aa, synthetic construct
  REGION 1..43: note = ATaRI peptide
VKFAGLLQVRWPGALGSVLSWLQTHTHTHTHTPHTIVIFIINL

SEQ ID NO: 1944 - protein, 23 aa, synthetic construct
  REGION 1..23: note = ATaRI peptide
LLADRCRLRYVAGMRTGMGWSKR

SEQ ID NO: 1945 - protein, 38 aa, synthetic construct
  REGION 1..38: note = ATaRI peptide
SMLPTMAAGKPGPDQGAGPCDTWQRGCLGAVPQRHGVL

SEQ ID NO: 1946 - protein, 26 aa, synthetic construct
  REGION 1..26: note = ATaRI peptide
IKSLERARVRHFTLKCSTSLSFSPLF

SEQ ID NO: 1947 - protein, 18 aa, synthetic construct
  REGION 1..18: note = ATaRI peptide
SSVKEAIIGKTLKIYYLG

SEQ ID NO: 1948 - protein, 24 aa, synthetic construct
  REGION 1..24: note = ATaRI peptide
PSSLDDLKVTIATGAYSPLSTTNM

SEQ ID NO: 1949 - protein, 15 aa, synthetic construct
  REGION 1..15: note = ATaRI peptide
PQSQYSPQVMFSLYW

SEQ ID NO: 1950 - protein, 41 aa, synthetic construct
  REGION 1..41: note = ATaRI peptide
EDIVTKLLVGLHSAWNKVIPLSSYLQRLLPTMGAMFLQFDP

SEQ ID NO: 1951 - protein, 33 aa, synthetic construct
  REGION 1..33: note = ATaRI peptide
EHDSLKIEVRLFCLLEGQVFEFPSLGTGIANMF

SEQ ID NO: 1952 - protein, 13 aa, synthetic construct
  REGION 1..13: note = ATaRI peptide
SLSHAITLVCTAY

SEQ ID NO: 1953 - protein, 17 aa, synthetic construct
  REGION 1..17: note = ATaRI peptide
NRFCLSKPGKFGRIDVP

SEQ ID NO: 1954 - protein, 13 aa, synthetic construct
  REGION 1..13: note = ATaRI peptide
SEYLPTLWVSPDF

SEQ ID NO: 1955 - protein, 9 aa, synthetic construct
  REGION 1..9: note = ATaRI peptide
METIEGAAG

SEQ ID NO: 1956 - protein, 175 aa, synthetic construct
  REGION 1..175: note = ATaRI peptide
QAVVDSLQGEALPRGPPLPPVFLGPRPLPPSGASRPLETLESLVDAVRQVGMSLSRTVVTGRAHPLWAEVRCPPRGLLLSLQSLGFPGPNCAVVARWGISRFSGLEADAGGALERGCCGNGLARCWAAGPRERPCSLCFPWGARWRLPRVCVSLARRRLGRGPAQHPERLPLPAG

SEQ ID NO: 1957 - protein, 9 aa, synthetic construct
  REGION 1..9: note = ATaRI peptide
TGLVEAALG

SEQ ID NO: 1958 - protein, 9 aa, synthetic construct
  REGION 1..9: note = ATaRI peptide
VKMLEDSQR

SEQ ID NO: 1959 - protein, 53 aa, synthetic construct
  REGION 1..53: note = ATaRI peptide
EGPPLKFQVSGPSPPRPRVAGPGLPSGCLSSPRVTASSRGPDLRSVRVDFSQG

SEQ ID NO: 1960 - protein, 10 aa, synthetic construct
  REGION 1..10: note = ATaRI peptide
SRTKQRLPGK

SEQ ID NO: 1961 - protein, 9 aa, synthetic construct
  REGION 1..9: note = ATaRI peptide
RRESELRFM

SEQ ID NO: 1962 - protein, 48 aa, synthetic construct
  REGION 1..48: note = ATaRI peptide
DLAMTYKQRSVRVHLLFLFFFFLRWGPAMLPRLSAVAVPRRDHSAQPP

SEQ ID NO: 1963 - protein, 24 aa, synthetic construct
  REGION 1..24: note = ATaRI peptide
QRLKDEARGQEALVSSPAWSPLPT

SEQ ID NO: 1964 - protein, 35 aa, synthetic construct
  REGION 1..35: note = ATaRI peptide
NTPGSFRRGKGSGNCRIFSVHKVFLGKNLGWVLGV

SEQ ID NO: 1965 - protein, 43 aa, synthetic construct
  REGION 1..43: note = ATaRI peptide
GDLLRKVGVRPHFPGVWCLPACLSGCVKGVDLVPSLSSFFLFF

SEQ ID NO: 1966 - protein, 30 aa, synthetic construct
  REGION 1..30: note = ATaRI peptide
TPLNKTKTVSHWGVSLWGVGRCTWTGSGGW

SEQ ID NO: 1967 - protein, 21 aa, synthetic construct
  REGION 1..21: note = ATaRI peptide
LSVSYSLQVRGDALGWIIKVC

SEQ ID NO: 1968 - protein, 92 aa, synthetic construct
  REGION 1..92: note = ATaRI peptide
FKITIIPQVGSGCGPGGEPELASPMIALTVVYVYFWGKHTFGPTSSFFFFFFFFFFLKQGLALLPRVECAGAISAHCNLRLPGSSDSPTPAS

SEQ ID NO: 1969 - protein, 28 aa, synthetic construct
  REGION 1..28: note = ATaRI peptide
LYNLALCLGMRFFLPSCHHLFFMFCRQK

SEQ ID NO: 1970 - protein, 28 aa, synthetic construct
  REGION 1..28: note = ATaRI peptide
EEPKSDLKGELLFSFPSPEWPHYFWKSC

SEQ ID NO: 1971 - protein, 70 aa, synthetic construct
  REGION 1..70: note = ATaRI peptide
LDSPGEFSGEYLTLLSVSPLCDGGSGWTGDAPSYPVTVAVWTAPHVAAAPLLLLAATAARKLVRFAPPAT

SEQ ID NO: 1972 - protein, 9 aa, synthetic construct
  REGION 1..9: note = ATaRI peptide
KELEEELKR

SEQ ID NO: 1973 - protein, 26 aa, synthetic construct
  REGION 1..26: note = ATaRI peptide
SPDPCPRSVSGRGFPRASRELAVLLP

SEQ ID NO: 1974 - protein, 37 aa, synthetic construct
  REGION 1..37: note = ATaRI peptide
EKYEELLQVFIRALERGCSRRKMADSNWVRGKHVRDC

SEQ ID NO: 1975 - protein, 25 aa, synthetic construct
  REGION 1..25: note = ATaRI peptide
GLDHDAELVGPYCYLFCFGTPYLGG

SEQ ID NO: 1976 - protein, 23 aa, synthetic construct
  REGION 1..23: note = ATaRI peptide
QEILDNVQVCDFSCFSYNKEIIR

SEQ ID NO: 1977 - protein, 25 aa, synthetic construct
  REGION 1..25: note = ATaRI peptide
KMLGTSSKGKESLKRLIPSMQIPLF

SEQ ID NO: 1978 - protein, 12 aa, synthetic construct
  REGION 1..12: note = ATaRI peptide
KQLRQTVKVRFL

SEQ ID NO: 1979 - protein, 29 aa, synthetic construct
  REGION 1..29: note = ATaRI peptide
EYTCKHFTVCVTVVLFLKELDFFMFIIVN

SEQ ID NO: 1980 - protein, 13 aa, synthetic construct
  REGION 1..13: note = ATaRI peptide
DFSVLFSVVSRIS

SEQ ID NO: 1981 - protein, 9 aa, synthetic construct
  REGION 1..9: note = ATaRI peptide
NMCHLMEDR

SEQ ID NO: 1982 - protein, 44 aa, synthetic construct
  REGION 1..44: note = ATaRI peptide
SVLPSFYQVRRFLCAVSWQERESSPHACPPIPLGVLLRGLRWHF

SEQ ID NO: 1983 - protein, 29 aa, synthetic construct
  REGION 1..29: note = ATaRI peptide
VLYVGEGQVRLRGRPRCLDRASWASACSG

SEQ ID NO: 1984 - protein, 33 aa, synthetic construct
  REGION 1..33: note = ATaRI peptide
TLFRKNKNVSRPHLEIVQRRVVPYDICLFLFGL

SEQ ID NO: 1985 - protein, 11 aa, synthetic construct
  REGION 1..11: note = ATaRI peptide
RPPQPCGIVSP

SEQ ID NO: 1986 - protein, 596 aa, synthetic construct
  REGION 1..596: note = ATaRI peptide
HPQLHPQQMIISRHLPSVCGGRFHPQRMIISRHLPSVSSLPFHPQLHPQQMIISRHLPSVCGGRFHPQRMIISRHLPSVRTPLPPSAPPSADDNIKTPAERLRGPLPPSADDNLKTPSERHIMPFHPQQMIISIHLPSVCGGRFHPQRMIISRHLPSVSSLPFHPQLHPQADDNIKTPAERLRGPLPPSADDNLKTPSERQLTPLPPSAPPSADDNIKTPAFHPQRMISRHLPSVSSLPFHPQLHPQQMIISRYLLSVCGFRFHHQPMIISRHLPSVSSLPFHPQLHPQQMIISRHLLSVCGGRFHPERMIISRHLPSVSSLPFHPQLHPQQMIISRHLPSVCGGRFHPQRMIISRHLPSVSSLPFHPQLHPQQMIISRHLPSVCGGRFHPQQMIISRHLPSVSSLPFHPQLHPQQMIISRHLPSVCGGRFHPQRMIISRHLPSVSSLPFHPQLHPQQMIISRHLPSVCGERLRGPLPPSADDNLKTPSERQLTPLPPSAPPSADDNIKTPAERLRGPLPPSADDNLKTPSERQLTPLPPSAPPSADDNIKTPAERLRGPLPPSADDNLKTPSERQLTPLPPSAPPSADDNIKTPA

SEQ ID NO: 1987 - protein, 178 aa, synthetic construct
  REGION 1..178: note = ATaRI peptide
CRRCALKSGRFVPRPRPDADRAHGCRAEAGGFSLVPCTASGPVWPLLGLGWGCSRPRDAQAEARDLHEQSGDTPNSSVSRLRDPTVGVGRGSPCQGWHPLGRPFSLARLSSSRTAPAPACLSALCPLPSWPHPTLFRAQLSVTGDTPSAPAAPSWWPTCAPVPMLRASEAQMDRSGPH

SEQ ID NO: 1988 - protein, 98 aa, synthetic construct
  REGION 1..98: note = ATaRI peptide
VLIKMASQVSRALSPVGTGLSKDFLQLTLVCAPFSPTPTLFNFCNFGGFFVIVYLLVVASIFFFFFLRQGLTLLPRSTVAQSQLTAALTSWSQAILSP

SEQ ID NO: 1989 - protein, 9 aa, synthetic construct
  REGION 1..9: note = ATaRI peptide
GAMRECFRT

SEQ ID NO: 1990 - protein, 12 aa, synthetic construct
  REGION 1..12: note = ATaRI peptide
VHGPSGFIGEFH

SEQ ID NO: 1991 - protein, 41 aa, synthetic construct
  REGION 1..41: note = ATaRI peptide
HDHLDNHRVSVKGGRLQASDPSRGRSGFTPRVNLQLRRWAA

SEQ ID NO: 1992 - protein, 36 aa, synthetic construct
  REGION 1..36: note = ATaRI peptide
LEKDPQRSGRAWQTCPWAATGLGREEPNFHSTGSYL

SEQ ID NO: 1993 - protein, 60 aa, synthetic construct
  REGION 1..60: note = ATaRI peptide
TTALLGQEVSPHPLPHPLPGSPDRWGRWPRFRMDLCSRFRGPRGRAEGRHLAAVWEGPGV

SEQ ID NO: 1994 - protein, 9 aa, synthetic construct
  REGION 1..9: note = ATaRI peptide
KRMTQLYRR

SEQ ID NO: 1995 - protein, 9 aa, synthetic construct
  REGION 1..9: note = ATaRI peptide
VQGNWVVKR

SEQ ID NO: 1996 - protein, 31 aa, synthetic construct
  REGION 1..31: note = ATaRI peptide
LCRGRDFVVSTLGSLDSRWGRGKRGAAVQGF

SEQ ID NO: 1997 - protein, 49 aa, synthetic construct
  REGION 1..49: note = ATaRI peptide
TLWIVYLWVSILTFCRGILVITNKNKLYKTIHISGLHYEYVVLPKKSGK

SEQ ID NO: 1998 - protein, 51 aa, synthetic construct
  REGION 1..51: note = ATaRI peptide
PEGILSQRGKGAPVSIMPPGFAGLTIVYLFSCLLYNDIHFFLNCGKIHMIF

SEQ ID NO: 1999 - protein, 34 aa, synthetic construct
  REGION 1..34: note = ATaRI peptide
LPSSWDYCRYLPPCPANFCIFSRDGVSPCWPAWS

SEQ ID NO: 2000 - protein, 12 aa, synthetic construct
  REGION 1..12: note = ATaRI peptide
PPFKKFSKGYVI

SEQ ID NO: 2001 - protein, 9 aa, synthetic construct
  REGION 1..9: note = ATaRI peptide
IACMVICTR

SEQ ID NO: 2002 - protein, 9 aa, synthetic construct
  REGION 1..9: note = ATaRI peptide
KYAIPTIDA

SEQ ID NO: 2003 - protein, 9 aa, synthetic construct
  REGION 1..9: note = ATaRI peptide
RRGERSCYR

SEQ ID NO: 2004 - protein, 28 aa, synthetic construct
  REGION 1..28: note = ATaRI peptide
VQNSKNQSGERRHFLRDSHLIIISCIAS

SEQ ID NO: 2005 - protein, 26 aa, synthetic construct
  REGION 1..26: note = ATaRI peptide
GPQALSKSGKLLTMPGSCYVAVANTH

SEQ ID NO: 2006 - protein, 44 aa, synthetic construct
  REGION 1..44: note = ATaRI peptide
PGFAEWEEESVRGTRRWEPVGVAGWVCLHYGPVHLTTLYHCAPL

SEQ ID NO: 2007 - protein, 33 aa, synthetic construct
  REGION 1..33: note = ATaRI peptide
AMFINYEQVKGSTGELDSIQDRRGGFPLPAPLG

SEQ ID NO: 2008 - protein, 18 aa, synthetic construct
  REGION 1..18: note = ATaRI peptide
RDLVEKLLVNIVNFLLER

SEQ ID NO: 2009 - protein, 67 aa, synthetic construct
  REGION 1..67: note = ATaRI peptide
TTRRMLSHRWVRAAAFLHAERPPHGSARLPQRSDNLCGAQSSPTGREVLGVPQGHPGLRCEKWSNKS

SEQ ID NO: 2010 - protein, 235 aa, synthetic construct
  REGION 1..235: note = ATaRI peptide
SDGWKFEQVRGPGQPGGSHAAAELVLTMAQGSVLLEMQTLLLASSCSSGGAHGSDLCPVSTGGALGVRVGWAEVSQALPRTFPSSLACLFFPALRFLRIIWHLCVREGTGVPRASWPAHYPAQSPSPTAHSIGAYGGPDAFPRLPPLPAHAGRCCQALVAFSLVLASCGGWGLMGLCRACLLQQLPRKPPECCMGHCAMALWLVIGDLRTREAWPLTGGPLPTTWLPLFLVLDRH

SEQ ID NO: 2011 - protein, 49 aa, synthetic construct
  REGION 1..49: note = ATaRI peptide
SEPSEKAKVSAGPALAWGSLGWGRLLPSQTFLLFCHSHQAPGVRPWWPC

SEQ ID NO: 2012 - protein, 66 aa, synthetic construct
  REGION 1..66: note = ATaRI peptide
APEPPKPYRYTRPRNHCQLLFLIVSSMLYFCLFAGWFLPKLFRFCSSEVEVSKKMCPRVSHSGSRA

SEQ ID NO: 2013 - protein, 85 aa, synthetic construct
  REGION 1..85: note = ATaRI peptide
NTSEDRPQVGMALALCSGHLKDGEARCCSGPSGHFLTVIYSVLHSPLCSFTLAFISHSLMSRPWARGQHSEAPGDQGSVRLGSDF

SEQ ID NO: 2014 - protein, 21 aa, synthetic construct
  REGION 1..21: note = ATaRI peptide
AGLGADERVGLELGGCGGTPR

SEQ ID NO: 2015 - protein, 9 aa, synthetic construct
  REGION 1..9: note = ATaRI peptide
SDDSRALDK

SEQ ID NO: 2016 - protein, 107 aa, synthetic construct
  REGION 1..107: note = ATaRI peptide
SPEDTYRGVSWGAVAVLSPASGKQHLDEWLAWQPERSINPPEFSKRSWGRYVQGERELLFPSANGKCRLKSAGHFQGTAQHRFSWCWGVLGRSRPQLAMVSFVPQVP

SEQ ID NO: 2017 - protein, 42 aa, synthetic construct
  REGION 1..42: note = ATaRI peptide
EKIPLSENSILCRTGVGSTQTEGSMGGSGTGQKPCVQREMAL

SEQ ID NO: 2018 - protein, 16 aa, synthetic construct
  REGION 1..16: note = ATaRI peptide
YLREHTAWVSWCQILA

SEQ ID NO: 2019 - protein, 20 aa, synthetic construct
  REGION 1..20: note = ATaRI peptide
PTSEVLLKVRACWPSILLEL

SEQ ID NO: 2020 - protein, 12 aa, synthetic construct
  REGION 1..12: note = ATaRI peptide
SALHAIRSRYRT

SEQ ID NO: 2021 - protein, 25 aa, synthetic construct
  REGION 1..25: note = ATaRI peptide
LRHQEKMKVLGPEGWGEWVSESGED

SEQ ID NO: 2022 - protein, 12 aa, synthetic construct
  REGION 1..12: note = ATaRI peptide
LEPGEKLRGEGI

SEQ ID NO: 2023 - protein, 29 aa, synthetic construct
  REGION 1..29: note = ATaRI peptide
CLLRQCTAVSSAPTFGLCPPFPIPSWNGW

SEQ ID NO: 2024 - protein, 30 aa, synthetic construct
  REGION 1..30: note = ATaRI peptide
SLPVPKFKVSVCWAPGVVVLRGCGGCVLAL

SEQ ID NO: 2025 - protein, 39 aa, synthetic construct
  REGION 1..39: note = ATaRI peptide
IHAQLDIKGEDSSACHSGLASSGGCTCKCLSGSGRRPGS

SEQ ID NO: 2026 - protein, 14 aa, synthetic construct
  REGION 1..14: note = ATaRI peptide
TPAEEDEDGEQGQA

SEQ ID NO: 2027 - protein, 16 aa, synthetic construct
  REGION 1..16: note = ATaRI peptide
EASPARPAGRCHRAVG

SEQ ID NO: 2028 - protein, 19 aa, synthetic construct
  REGION 1..19: note = ATaRI peptide
YVGQNIRQVRLHSQPRPGF

SEQ ID NO: 2029 - protein, 40 aa, synthetic construct
  REGION 1..40: note = ATaRI peptide
EVDGKDHKVSGWPGVGRGRGGPGHLPDDPHHHQRGGGSLS

SEQ ID NO: 2030 - protein, 21 aa, synthetic construct
  REGION 1..21: note = ATaRI peptide
FKQIGIIKVLVERSGSFLSVL

SEQ ID NO: 2031 - protein, 14 aa, synthetic construct
  REGION 1..14: note = ATaRI peptide
RAALLLFTGEPGPQ

SEQ ID NO: 2032 - protein, 38 aa, synthetic construct
  REGION 1..38: note = ATaRI peptide
YRYVAEGQVHPLGKEEEAGLGVSVDSRAVQNPGWAWRW

SEQ ID NO: 2033 - protein, 15 aa, synthetic construct
  REGION 1..15: note = ATaRI peptide
EETVAIQPGRWERMK

SEQ ID NO: 2034 - protein, 21 aa, synthetic construct
  REGION 1..21: note = ATaRI peptide
RAWETETTGERERELFYLWFV

SEQ ID NO: 2035 - protein, 32 aa, synthetic construct
  REGION 1..32: note = ATaRI peptide
DPQAVKERGEAQLSGQVGGRRGLGVAPDTSWM

SEQ ID NO: 2036 - protein, 11 aa, synthetic construct
  REGION 1..11: note = ATaRI peptide
LSPRGPAPGKE

SEQ ID NO: 2037 - protein, 10 aa, synthetic construct
  REGION 1..10: note = ATaRI peptide
RIAIKEILVR

SEQ ID NO: 2038 - protein, 9 aa, synthetic construct
  REGION 1..9: note = ATaRI peptide
RLETLQSVR

SEQ ID NO: 2039 - protein, 47 aa, synthetic construct
  REGION 1..47: note = ATaRI peptide
TAMEMLMQGTPASFAGLPPCALFHRTPGQDWGRLLSIEAHKRAANGP

SEQ ID NO: 2040 - protein, 16 aa, synthetic construct
  REGION 1..16: note = ATaRI peptide
EIKKAYYQVCMEVRFW

SEQ ID NO: 2041 - protein, 78 aa, synthetic construct
  REGION 1..78: note = ATaRI peptide
RVMIPVPAGGCLGPPCPGAWRGQTGLRLPHRVERVDRAEATALSVSGLLVEVMVEALEPQAGGGTGVSLNLSVSASYP

SEQ ID NO: 2042 - protein, 43 aa, synthetic construct
  REGION 1..43: note = ATaRI peptide
NGVTLTSSGKESEDYMVTRGGLRAPQGMDNSGQHVGVSTSGSS

SEQ ID NO: 2043 - protein, 9 aa, synthetic construct
  REGION 1..9: note = ATaRI peptide
RPQSKAPDR

SEQ ID NO: 2044 - protein, 41 aa, synthetic construct
  REGION 1..41: note = ATaRI peptide
QACGGNSLGEAPTCQAPRREMNECSQAAPASSGGSCMRMGV

SEQ ID NO: 2045 - protein, 10 aa, synthetic construct
  REGION 1..10: note = ATaRI peptide
MLFTSFVERK

SEQ ID NO: 2046 - protein, 10 aa, synthetic construct
  REGION 1..10: note = ATaRI peptide
KLDHYYRIGE

SEQ ID NO: 2047 - protein, 18 aa, synthetic construct
  REGION 1..18: note = ATaRI peptide
LPRESRSHVRHLIMINLT

SEQ ID NO: 2048 - protein, 41 aa, synthetic construct
  REGION 1..41: note = ATaRI peptide
PVLHHTTEGIVVFLRNSSYQHFLNVYLKCISESFVKNNNLY

SEQ ID NO: 2049 - protein, 15 aa, synthetic construct
  REGION 1..15: note = ATaRI peptide
FLLIDDIKVASEHLS

SEQ ID NO: 2050 - protein, 19 aa, synthetic construct
  REGION 1..19: note = ATaRI peptide
HEILQKLNVRQMHFPHGPK

SEQ ID NO: 2051 - protein, 52 aa, synthetic construct
  REGION 1..52: note = ATaRI peptide
GPNFITKEGKHACLGEHFKRTSLALNIYQICISYPLKCYKLFPLSLNLLFHF

SEQ ID NO: 2052 - protein, 9 aa, synthetic construct
  REGION 1..9: note = ATaRI peptide
ILQPQQNGR

SEQ ID NO: 2053 - protein, 13 aa, synthetic construct
  REGION 1..13: note = ATaRI peptide
QYRQIVVEVSSKK

SEQ ID NO: 2054 - protein, 30 aa, synthetic construct
  REGION 1..30: note = ATaRI peptide
QFYKYAVQVSCFYFFLKPIFLWFFCFPKIW

SEQ ID NO: 2055 - protein, 21 aa, synthetic construct
  REGION 1..21: note = ATaRI peptide
EKKKKSPKVRMCLLLDFRNAF

SEQ ID NO: 2056 - protein, 9 aa, synthetic construct
  REGION 1..9: note = ATaRI peptide
KKSKFSKAG

SEQ ID NO: 2057 - protein, 9 aa, synthetic construct
  REGION 1..9: note = ATaRI peptide
QDINGILLE

SEQ ID NO: 2058 - protein, 9 aa, synthetic construct
  REGION 1..9: note = ATaRI peptide
WPKGWMQAR

SEQ ID NO: 2059 - protein, 36 aa, synthetic construct
  REGION 1..36: note = ATaRI peptide
VTSSTSLSVSICHSSLPCPTHRGLGDEVACLAPGGE

SEQ ID NO: 2060 - protein, 13 aa, synthetic construct
  REGION 1..13: note = ATaRI peptide
LIDPETQKVEVLF

SEQ ID NO: 2061 - protein, 9 aa, synthetic construct
  REGION 1..9: note = ATaRI peptide
TVNVLWNIW

SEQ ID NO: 2062 - protein, 11 aa, synthetic construct
  REGION 1..11: note = ATaRI peptide
LLLKTLVAGKI

SEQ ID NO: 2063 - protein, 9 aa, synthetic construct
  REGION 1..9: note = ATaRI peptide
PTWKPLIRK

SEQ ID NO: 2064 - protein, 25 aa, synthetic construct
  REGION 1..25: note = ATaRI peptide
KELWPSADVSPFLGSLCFGQSLSTG

SEQ ID NO: 2065 - protein, 41 aa, synthetic construct
  REGION 1..41: note = ATaRI peptide
VKVLDKATVSSAAFHIKILSYLPMKLELKLKFGEHSCIASE

SEQ ID NO: 2066 - protein, 16 aa, synthetic construct
  REGION 1..16: note = ATaRI peptide
LMAVSFLQVSHMGIAC

SEQ ID NO: 2067 - protein, 28 aa, synthetic construct
  REGION 1..28: note = ATaRI peptide
TQSSSSDVVSMKASALLNSDACTFSCWG

SEQ ID NO: 2068 - protein, 47 aa, synthetic construct
  REGION 1..47: note = ATaRI peptide
GKFDQIAKVSPLAYNGQSQAPPLPITPQGCPVFSALLELGWGGVAEF

SEQ ID NO: 2069 - protein, 26 aa, synthetic construct
  REGION 1..26: note = ATaRI peptide
LEKGFEREVRAPSSLLRRGTGSPGLG

SEQ ID NO: 2070 - protein, 46 aa, synthetic construct
  REGION 1..46: note = ATaRI peptide
GYFVGVDMVRKFWIKYLCDIYISLYIYVYIYINIYIHTYIYTHIYV

SEQ ID NO: 2071 - protein, 10 aa, synthetic construct
  REGION 1..10: note = ATaRI peptide
EVLAGLELVI

SEQ ID NO: 2072 - protein, 33 aa, synthetic construct
  REGION 1..33: note = ATaRI peptide
QIERCNSLGIWMLFVYLTTWNDSNSNLISCYIR

SEQ ID NO: 2073 - protein, 16 aa, synthetic construct
  REGION 1..16: note = ATaRI peptide
EGLKLMNLVSNLILSL

SEQ ID NO: 2074 - protein, 10 aa, synthetic construct
  REGION 1..10: note = ATaRI peptide
CNHPYLIKGS

SEQ ID NO: 2075 - protein, 9 aa, synthetic construct
  REGION 1..9: note = ATaRI peptide
KHIKHHCNK

SEQ ID NO: 2076 - protein, 38 aa, synthetic construct
  REGION 1..38: note = ATaRI peptide
QRANDYMDGYVCFRVMNFLYISLLFNISIFYVTLFIFK

SEQ ID NO: 2077 - protein, 18 aa, synthetic construct
  REGION 1..18: note = ATaRI peptide
DEEEAQKRGTMHKIILLF

SEQ ID NO: 2078 - protein, 11 aa, synthetic construct
  REGION 1..11: note = ATaRI peptide
LAASYWPKVKK

SEQ ID NO: 2079 - protein, 10 aa, synthetic construct
  REGION 1..10: note = ATaRI peptide
INRRNARKVF

SEQ ID NO: 2080 - protein, 38 aa, synthetic construct
  REGION 1..38: note = ATaRI peptide
RLGDMDLSVSKITNVLISAMKHNFLPALFCGLFFLLYI

SEQ ID NO: 2081 - protein, 25 aa, synthetic construct
  REGION 1..25: note = ATaRI peptide
IEMAYARQVSVILRGIKPGKSFVNL

SEQ ID NO: 2082 - protein, 26 aa, synthetic construct
  REGION 1..26: note = ATaRI peptide
SVAELDDKVAPRANSSRNRGPVFRWA

SEQ ID NO: 2083 - protein, 20 aa, synthetic construct
  REGION 1..20: note = ATaRI peptide
QPESQLHHGEDWSWGVGRGW

SEQ ID NO: 2084 - protein, 44 aa, synthetic construct
  REGION 1..44: note = ATaRI peptide
KQCKKQQLGGYQCGEEHKQRDGVAWGPRPGPWTLSPANKPPEAQ

SEQ ID NO: 2085 - protein, 9 aa, synthetic construct
  REGION 1..9: note = ATaRI peptide
GCGQIENLR

SEQ ID NO: 2086 - protein, 9 aa, synthetic construct
  REGION 1..9: note = ATaRI peptide
TETTAELQR

SEQ ID NO: 2087 - protein, 9 aa, synthetic construct
  REGION 1..9: note = ATaRI peptide
ASGSVTEIR

SEQ ID NO: 2088 - protein, 9 aa, synthetic construct
  REGION 1..9: note = ATaRI peptide
LPQHLRVLQ

SEQ ID NO: 2089 - protein, 43 aa, synthetic construct
  REGION 1..43: note = ATaRI peptide
PAGKGLITVPVPSRLSAPPPSPPHTLPHQWAASLADNHQLCLE

SEQ ID NO: 2090 - protein, 9 aa, synthetic construct
  REGION 1..9: note = ATaRI peptide
AEEKIILPR

SEQ ID NO: 2091 - protein, 9 aa, synthetic construct
  REGION 1..9: note = ATaRI peptide
PESSHSPPR

SEQ ID NO: 2092 - protein, 30 aa, synthetic construct
  REGION 1..30: note = ATaRI peptide
LHIHSRQEVRGRPGQEADAGWAGARWRWGL

SEQ ID NO: 2093 - protein, 39 aa, synthetic construct
  REGION 1..39: note = ATaRI peptide
LTYFAVLMVRVPAPTSQPHPRPCACSVQALFIYSVIYSS

SEQ ID NO: 2094 - protein, 9 aa, synthetic construct
  REGION 1..9: note = ATaRI peptide
PEGVIYPSM

SEQ ID NO: 2095 - protein, 78 aa, synthetic construct
  REGION 1..78: note = ATaRI peptide
FSIITSFQGKEKTRPLAQAGCLHMEQGQGRDHPGNLKTSLLWASVIPFIKWGHPGHSQQVLIEHLLCAGPVLSHRAYG

SEQ ID NO: 2096 - protein, 22 aa, synthetic construct
  REGION 1..22: note = ATaRI peptide
SPRQPGSCVSGFHFSLSPHLFC

SEQ ID NO: 2097 - protein, 22 aa, synthetic construct
  REGION 1..22: note = ATaRI peptide
VWDLEAAKSRPPSLPPVHAHLP

SEQ ID NO: 2098 - protein, 172 aa, synthetic construct
  REGION 1..172: note = ATaRI peptide
EDAEVHAEVRPPPCPLAAGWGLGGRGATSAGWDLEVEGAETRPLFWAVAGKQADLAVCPSPARPLQRTSSQTLEGAGPRSPPRYSYSPVLGTEPPPRPPYIQPVSREPLPPPPALASPPSFPPGQPIPREPGWRAVALFASGEGAALGDSHRRSKSWAAGQLRSCPGGLPSG

SEQ ID NO: 2099 - protein, 68 aa, synthetic construct
  REGION 1..68: note = ATaRI peptide
ESPYAYSNGKARPAARAATRGPSPASWARSSPSARPFQAPPNVPRNAFAWLPDSVARWLRGARAPVPR

SEQ ID NO: 2100 - protein, 9 aa, synthetic construct
  REGION 1..9: note = ATaRI peptide
GRRVKLELW

SEQ ID NO: 2101 - protein, 17 aa, synthetic construct
  REGION 1..17: note = ATaRI peptide
EKIWRPNRGGWAGAGQP

SEQ ID NO: 2102 - protein, 94 aa, synthetic construct
  REGION 1..94: note = ATaRI peptide
FGGHGTRQVRLLRLCPEQLSLAGSSAEYRTGREERPMSCGGCVWAPEPPWHSGPVPLQSAASRVLRHLPRPQLLSPPGARGLSGSRASLTHWLG

SEQ ID NO: 2103 - protein, 174 aa, synthetic construct
  REGION 1..174: note = ATaRI peptide
ARPPEGGDGEQQGSWRSGGIRGSERAQAQWQQVLTHVQLWGAGAIAAHQVEHSGVGVGAAFPLLLSLIRWNTVGSGWGQLFLSPLAPGTLSPSDEEGPCEESCDPEGLGQASGPPVLTEEEAGRAGDGAWAAAVGSWGLALPPRSPGQPREQWRAGQGRWCRCRGLRTVGESPV

SEQ ID NO: 2104 - protein, 69 aa, synthetic construct
  REGION 1..69: note = ATaRI peptide
EGIIKPMKVCRPMATMSNVRLGALGTHRSCLGIAPGPETIKGPSKLQGGHVFMETVIQCLRPSYLGSKS

SEQ ID NO: 2105 - protein, 44 aa, synthetic construct
  REGION 1..44: note = ATaRI peptide
PQINWNLTVSTSGHSGHERITCLLAPRKSWNLSRSCLVLVHFDP

SEQ ID NO: 2106 - protein, 14 aa, synthetic construct
  REGION 1..14: note = ATaRI peptide
DAFNQRLKVTINDN

SEQ ID NO: 2107 - protein, 30 aa, synthetic construct
  REGION 1..30: note = ATaRI peptide
GLQRMIFEVSCGSPRNKLPGGLLVMAGPGE

SEQ ID NO: 2108 - protein, 28 aa, synthetic construct
  REGION 1..28: note = ATaRI peptide
PLLTSLGKVRGCGPSEVPASSLPCCRIP

SEQ ID NO: 2109 - protein, 72 aa, synthetic construct
  REGION 1..72: note = ATaRI peptide
GADIVYCEVRGSDFLGGLLHKYRLLFICVWEWSGVSGDRMGIDFIGVHQRLEETNMCDTDESCEPCQGPGAW

SEQ ID NO: 2110 - protein, 52 aa, synthetic construct
  REGION 1..52: note = ATaRI peptide
IQCKRVVNGEYRSGSRIMHMPCWAQAALPLPLPGVTVSCLASLSNSIDHMLP

SEQ ID NO: 2111 - protein, 9 aa, synthetic construct
  REGION 1..9: note = ATaRI peptide
RALAVARLV

SEQ ID NO: 2112 - protein, 30 aa, synthetic construct
  REGION 1..30: note = ATaRI peptide
CPKQYSTKVNWFLYTPHKHRMQIKRLTRHN

SEQ ID NO: 2113 - protein, 49 aa, synthetic construct
  REGION 1..49: note = ATaRI peptide
SDPDKIEKVSPPRVKAGVLKHSSKLELSRTPPSTNTRFTDVHPVSLPEA

SEQ ID NO: 2114 - protein, 9 aa, synthetic construct
  REGION 1..9: note = ATaRI peptide
IAAIAVHGR

SEQ ID NO: 2115 - protein, 68 aa, synthetic construct
  REGION 1..68: note = ATaRI peptide
VMQKYIRYVRLCTFSKQAFLTVYHTPAESTLCEPPAASCACCSSPFLFSSCSVAALAHCFIRSPQLQC

SEQ ID NO: 2116 - protein, 13 aa, synthetic construct
  REGION 1..13: note = ATaRI peptide
IIREKCQGVRNLP

SEQ ID NO: 2117 - protein, 64 aa, synthetic construct
  REGION 1..64: note = ATaRI peptide
HSDPEEMQVRGRSLACALSGNLSTAVHGKVTVEPWTQENLETGGLCQNQRQKFLKSKQRLAVVT

SEQ ID NO: 2118 - protein, 12 aa, synthetic construct
  REGION 1..12: note = ATaRI peptide
ARELGRNQVGRC

SEQ ID NO: 2119 - protein, 12 aa, synthetic construct
  REGION 1..12: note = ATaRI peptide
KLLTPAEEVNIH

SEQ ID NO: 2120 - protein, 9 aa, synthetic construct
  REGION 1..9: note = ATaRI peptide
MITIKEAIR

SEQ ID NO: 2121 - protein, 41 aa, synthetic construct
  REGION 1..41: note = ATaRI peptide
LRKITFPHVSVHSKPLLTPHLPIPVSPCPTSSEHSSRSANL

SEQ ID NO: 2122 - protein, 17 aa, synthetic construct
  REGION 1..17: note = ATaRI peptide
RLGSTVATGKMGARFFQ

SEQ ID NO: 2123 - protein, 13 aa, synthetic construct
  REGION 1..13: note = ATaRI peptide
HLLHLKTKVRKFV

SEQ ID NO: 2124 - protein, 36 aa, synthetic construct
  REGION 1..36: note = ATaRI peptide
HDNISLKRVSDSPISGHIRGNFLNMSFLCEVEINWM

SEQ ID NO: 2125 - protein, 22 aa, synthetic construct
  REGION 1..22: note = ATaRI peptide
LHAFQPQSGGNLVTGHGETCRV

SEQ ID NO: 2126 - protein, 16 aa, synthetic construct
  REGION 1..16: note = ATaRI peptide
CMILRFKKGEWEKVAL

SEQ ID NO: 2127 - protein, 15 aa, synthetic construct
  REGION 1..15: note = ATaRI peptide
QQGFPTVKVFTLFII

SEQ ID NO: 2128 - protein, 21 aa, synthetic construct
  REGION 1..21: note = ATaRI peptide
VLNPRGLRVSGASPSPLPTPE

SEQ ID NO: 2129 - protein, 31 aa, synthetic construct
  REGION 1..31: note = ATaRI peptide
PNGSALTDGECRPAPQDCAGTGWGWAGARRC

SEQ ID NO: 2130 - protein, 72 aa, synthetic construct
  REGION 1..72: note = ATaRI peptide
KQIQWFWQVGPGPRPWQGHLGHQPKETGPEEASRARTFSFGPVLASHTLQKETIDQPWDERGQFQLSGGQWM

SEQ ID NO: 2131 - protein, 28 aa, synthetic construct
  REGION 1..28: note = ATaRI peptide
YFVNCAGQVGQHQHCCSYLTFVSKIFLV

SEQ ID NO: 2132 - protein, 75 aa, synthetic construct
  REGION 1..75: note = ATaRI peptide
LSARAGFTVSAHQGHLPGLCPCWNQVISEIPSSSGSIALANSALVSVFVSVNWADSSLPCRSSEGRRQGQLLQCF

SEQ ID NO: 2133 - protein, 42 aa, synthetic construct
  REGION 1..42: note = ATaRI peptide
RPDGRVPLVWLLGPGCGALGTLWDREGGSDFLRFLLEASRTS

SEQ ID NO: 2134 - protein, 151 aa, synthetic construct
  REGION 1..151: note = ATaRI peptide
LRDQPLTMGGYCLSAPWGGETMGVRTPRMELLTACWARQPSTGTGQFSCPVPEPPTELPPSPSCLPFVSFLGSPSLSTFVSVFFCLFVLFFETDSLFVAPARVRWCDLSSLQPPPPGFKQFSCLSLLRTWDNSHASSHLANFSIFSWSGWS

SEQ ID NO: 2135 - protein, 14 aa, synthetic construct
  REGION 1..14: note = ATaRI peptide
PLLATLDQGECAGW

SEQ ID NO: 2136 - protein, 22 aa, synthetic construct
  REGION 1..22: note = ATaRI peptide
TLETDEDMVSRPWMDQYSYSMR

SEQ ID NO: 2137 - protein, 29 aa, synthetic construct
  REGION 1..29: note = ATaRI peptide
LVYFEMDPVCYFIIHCGTYCRDQRERWAL

SEQ ID NO: 2138 - protein, 25 aa, synthetic construct
  REGION 1..25: note = ATaRI peptide
QRKQQMAEVMRLTFRGSIKRCVKLC

SEQ ID NO: 2139 - protein, 10 aa, synthetic construct
  REGION 1..10: note = ATaRI peptide
DKFGNICVVS

SEQ ID NO: 2140 - protein, 10 aa, synthetic construct
  REGION 1..10: note = ATaRI peptide
LKLLEKKKSE

SEQ ID NO: 2141 - protein, 43 aa, synthetic construct
  REGION 1..43: note = ATaRI peptide
ELRRLLTKVGSCTPLQALSHQPVPPAPLHSPGRTFSITLRSCP

SEQ ID NO: 2142 - protein, 9 aa, synthetic construct
  REGION 1..9: note = ATaRI peptide
DIASVVKEV

SEQ ID NO: 2143 - protein, 22 aa, synthetic construct
  REGION 1..22: note = ATaRI peptide
ESPRHRPKGRLTVLVACEDSSV

SEQ ID NO: 2144 - protein, 71 aa, synthetic construct
  REGION 1..71: note = ATaRI peptide
TEDGKVDYRWAASASSTSALLQRWGPMWAVAAEPIDFVAPEWETLRIPLCIFHSLWSLPPGLFTVLHFSYM

SEQ ID NO: 2145 - protein, 9 aa, synthetic construct
  REGION 1..9: note = ATaRI peptide
RTGPGQCFR

SEQ ID NO: 2146 - protein, 14 aa, synthetic construct
  REGION 1..14: note = ATaRI peptide
MKRYCPNSVSGVYF

SEQ ID NO: 2147 - protein, 26 aa, synthetic construct
  REGION 1..26: note = ATaRI peptide
SVGKDGFQVQLTMCLEVFMSCLSDQK

SEQ ID NO: 2148 - protein, 9 aa, synthetic construct
  REGION 1..9: note = ATaRI peptide
WPRPLLTSG

SEQ ID NO: 2149 - protein, 10 aa, synthetic construct
  REGION 1..10: note = ATaRI peptide
TREFEEVVVC

SEQ ID NO: 2150 - protein, 14 aa, synthetic construct
  REGION 1..14: note = ATaRI peptide
EKETLLAWVSWAGL

SEQ ID NO: 2151 - protein, 9 aa, synthetic construct
  REGION 1..9: note = ATaRI peptide
LGLPEEPVR

SEQ ID NO: 2152 - protein, 17 aa, synthetic construct
  REGION 1..17: note = ATaRI peptide
LFTVRSEKVGGQKISCP

SEQ ID NO: 2153 - protein, 44 aa, synthetic construct
  REGION 1..44: note = ATaRI peptide
AVPLHVDKVMASKEVPFLSREISAQVGSYFGPYLIDIEIQMNCS

SEQ ID NO: 2154 - protein, 53 aa, synthetic construct
  REGION 1..53: note = ATaRI peptide
CQPEFLYEGKMHPLVLSLGKGQIFTGSPEASLHNNSLLCMDKGQKGKGLGMPW

SEQ ID NO: 2155 - protein, 16 aa, synthetic construct
  REGION 1..16: note = ATaRI peptide
PGAKDEDDGKTLRSHA

SEQ ID NO: 2156 - protein, 9 aa, synthetic construct
  REGION 1..9: note = ATaRI peptide
LDYIFSGQV

SEQ ID NO: 2157 - protein, 9 aa, synthetic construct
  REGION 1..9: note = ATaRI peptide
LQPIPFPKE

SEQ ID NO: 2158 - protein, 37 aa, synthetic construct
  REGION 1..37: note = ATaRI peptide
RQRELKELVSPRLLRTTPLPSRPGGARAGCGAASTWT

SEQ ID NO: 2159 - protein, 9 aa, synthetic construct
  REGION 1..9: note = ATaRI peptide
KDSSVFILG

SEQ ID NO: 2160 - protein, 15 aa, synthetic construct
  REGION 1..15: note = ATaRI peptide
PFPRDVGKVSQTNSK

SEQ ID NO: 2161 - protein, 31 aa, synthetic construct
  REGION 1..31: note = ATaRI peptide
REVIAVYQVSTPLPCPPCAQKCGFQRLFSSH

SEQ ID NO: 2162 - protein, 9 aa, synthetic construct
  REGION 1..9: note = ATaRI peptide
CEVLQKISE

SEQ ID NO: 2163 - protein, 9 aa, synthetic construct
  REGION 1..9: note = ATaRI peptide
WSYVAGLPR

SEQ ID NO: 2164 - protein, 45 aa, synthetic construct
  REGION 1..45: note = ATaRI peptide
KLLSPSNESRLWSTCRRVVQEFAVNRCCILICYVASLPLSRFPFK

SEQ ID NO: 2165 - protein, 146 aa, synthetic construct
  REGION 1..146: note = ATaRI peptide
KTSAVNYMSESRPSSAPPALPATSKGDGVGGGGELVDLGLQIHRQWQTGCGEAHGGTTIRRFSKTIFLSHFKSEHYRTCAWVAFSPHPGRYFKVRPSLVLSKGTWAEVGFLWEALALQRAGSVQPGSGRFHSFLTRSWVWTQLAHP

SEQ ID NO: 2166 - protein, 9 aa, synthetic construct
  REGION 1..9: note = ATaRI peptide
RCKGSTCNR

SEQ ID NO: 2167 - protein, 9 aa, synthetic construct
  REGION 1..9: note = ATaRI peptide
EKPATHCPR

SEQ ID NO: 2168 - protein, 9 aa, synthetic construct
  REGION 1..9: note = ATaRI peptide
LRNGVQSER

SEQ ID NO: 2169 - protein, 9 aa, synthetic construct
  REGION 1..9: note = ATaRI peptide
RTKRSPTTR

SEQ ID NO: 2170 - protein, 94 aa, synthetic construct
  REGION 1..94: note = ATaRI peptide
DAGEEEEKRCVCPRDFVPFYSAGSCEGHCRVGAVHCAELLQQAQPRRRCSLVAGGEGGPGEVRPALGQAGNASQNWAGGSLPRPEHSEIVRKQM

SEQ ID NO: 2171 - protein, 9 aa, synthetic construct
  REGION 1..9: note = ATaRI peptide
HPFPHPAFR

SEQ ID NO: 2172 - protein, 53 aa, synthetic construct
  REGION 1..53: note = ATaRI peptide
EQLTPTRAGTWAWVGCAGQGLSHPRGGALNRSTCRLPWCKCSPAEFALKAWCG

SEQ ID NO: 2173 - protein, 70 aa, synthetic construct
  REGION 1..70: note = ATaRI peptide
DSPAVSLSGKGRIAPPATTQDHPMGCPGSEATTRGLHHCECGLLQAVFFHSCTSVRFLHSCDSHWDGTSV

SEQ ID NO: 2174 - protein, 19 aa, synthetic construct
  REGION 1..19: note = ATaRI peptide
MARTVYCTGNEVTSQAAGK

SEQ ID NO: 2175 - protein, 11 aa, synthetic construct
  REGION 1..11: note = ATaRI peptide
PEDLRMFARWV

SEQ ID NO: 2176 - protein, 150 aa, synthetic construct
  REGION 1..150: note = ATaRI peptide
LTGLLDLQVTPPPLPRPHHPWLPAAASGATLELFGMVLCLLFQQFVTGCAAPSLGGFAHAVSSAGDASLSLHPIPTPIPELLVFFVVVFFNLFFIFLILRHGQALLASPALNSWPQTILPPQPPKVLGSACRHWLSFLFILFYFICLFIF

SEQ ID NO: 2177 - protein, 9 aa, synthetic construct
  REGION 1..9: note = ATaRI peptide
TQTCNKVRW

SEQ ID NO: 2178 - protein, 26 aa, synthetic construct
  REGION 1..26: note = ATaRI peptide
DSLENVISKSVARHQPHLSLPLCGVP

SEQ ID NO: 2179 - protein, 31 aa, synthetic construct
  REGION 1..31: note = ATaRI peptide
PLTIYGIRCKSGPALGDWGVRGAGSGPTFQC

SEQ ID NO: 2180 - protein, 122 aa, synthetic construct
  REGION 1..122: note = ATaRI peptide
NSSSYCPSGRPRAAGEAALPRSGQLAWWHPQGQPVRGQRLHQWPGAEARGLRGAHGAVEPQDLCLAPCALHTDSLGPAPGSSVRDRGPVGPPGSLLDGGKEAEAFAWGCRPLYSHDLPGDSG

SEQ ID NO: 2181 - protein, 145 aa, synthetic construct
  REGION 1..145: note = ATaRI peptide
HHVGQDGQVSVPVPMHMRALRCRGMGFSGEGVGRSGECPGPHVHVGIALPRGGALTGGVGRSLWALRCRGVGLSWEGGGWSGECHSPPLTYRPWCCQGMGALAGGSEGAKASQCEPQSRTGFPHHDNAQAWKGGGQGLGVTFAAP

SEQ ID NO: 2182 - protein, 11 aa, synthetic construct
  REGION 1..11: note = ATaRI peptide
DGKLLCRQVGS

SEQ ID NO: 2183 - protein, 19 aa, synthetic construct
  REGION 1..19: note = ATaRI peptide
SDHTAGAQVSLGPRAGTLK

SEQ ID NO: 2184 - protein, 48 aa, synthetic construct
  REGION 1..48: note = ATaRI peptide
IEFYELDKVRLSEISLVNGWVYGNKIWPGVVVHACNPNTLGGQGRRIT

SEQ ID NO: 2185 - protein, 30 aa, synthetic construct
  REGION 1..30: note = ATaRI peptide
GKGLTFSIGIVYIACVPNLDTHFPEFVVGQ

SEQ ID NO: 2186 - protein, 62 aa, synthetic construct
  REGION 1..62: note = ATaRI peptide
PTCRFFMKGNCLRVRPSRSQLGPHLLGLWCWLTLPGPALLKAVLWALLARWWWWWWWWWWQY

SEQ ID NO: 2187 - protein, 27 aa, synthetic construct
  REGION 1..27: note = ATaRI peptide
RGLRHAKEVNTIQQKSRQERCYYRSGS

SEQ ID NO: 2188 - protein, 9 aa, synthetic construct
  REGION 1..9: note = ATaRI peptide
KPRSPQPPR

SEQ ID NO: 2189 - protein, 10 aa, synthetic construct
  REGION 1..10: note = ATaRI peptide
EPAHGHAAGE

SEQ ID NO: 2190 - protein, 143 aa, synthetic construct
  REGION 1..143: note = ATaRI peptide
VRMDKEKDGEQEIGVLGPRTGRRQKDVSYLKFPQSDCTVLVAGAGLWEGSGVAQHITPRSTRSLSCLPGGLCSLHPLLPLLSGEATSLQAQLCCPLHPQHLPVQAGPCHAPHRCPRCLERCRFVFGQGRVKSAYWAGHGGSCL

SEQ ID NO: 2191 - protein, 9 aa, synthetic construct
  REGION 1..9: note = ATaRI peptide
DEFSDLSEG

SEQ ID NO: 2192 - protein, 14 aa, synthetic construct
  REGION 1..14: note = ATaRI peptide
YRGADGMKVSTGCA

SEQ ID NO: 2193 - protein, 91 aa, synthetic construct
  REGION 1..91: note = ATaRI peptide
GAREPEAAGEAGGGAAGGDRGLGRPSRPLGGGGPGGEAATGSGAGDPLLCGTRSSLPPTLRPSFPLSFLPPSLPPSSPSPALDVPLPDPPT

SEQ ID NO: 2194 - protein, 32 aa, synthetic construct
  REGION 1..32: note = ATaRI peptide
PDPPPLSPGISLRLSPSSLPSHFNAFQGSCGW

SEQ ID NO: 2195 - protein, 21 aa, synthetic construct
  REGION 1..21: note = ATaRI peptide
KSSTGEASVRELGLAVLCPSA

SEQ ID NO: 2196 - protein, 66 aa, synthetic construct
  REGION 1..66: note = ATaRI peptide
QEMARDLVGKAEPPPHSPQLWEHLKLSRQMRWCKMTGVARISMTALLRYNLRSTKLTHLKFLFVGV

SEQ ID NO: 2197 - protein, 41 aa, synthetic construct
  REGION 1..41: note = ATaRI peptide
VEELVEIRVRLGPWKWGAGALCQVGPRAGPVPSSPLGHGRF

SEQ ID NO: 2198 - protein, 20 aa, synthetic construct
  REGION 1..20: note = ATaRI peptide
ERDKQILLVSFPLDSSPSLA

SEQ ID NO: 2199 - protein, 80 aa, synthetic construct
  REGION 1..80: note = ATaRI peptide
PPWPSSTKVRPPPPSWYRLAAPARARPRPYRLSGRFGGPRRRRPRGSRPVAPRPCRPLPARWRRGREARGWGDRPEPAWG

SEQ ID NO: 2200 - protein, 20 aa, synthetic construct
  REGION 1..20: note = ATaRI peptide
ILGKITLAVSTWSLNYSLCI

SEQ ID NO: 2201 - protein, 12 aa, synthetic construct
  REGION 1..12: note = ATaRI peptide
VWSLGITLVCLC

SEQ ID NO: 2202 - protein, 16 aa, synthetic construct
  REGION 1..16: note = ATaRI peptide
RPKYKELLVSVGLWGL

SEQ ID NO: 2203 - protein, 18 aa, synthetic construct
  REGION 1..18: note = ATaRI peptide
AATGSLDAGKCPAMWSLI

SEQ ID NO: 2204 - protein, 92 aa, synthetic construct
  REGION 1..92: note = ATaRI peptide
LLGGGMKQVRTLPSIGPSLKQFSKQSCLLKTPPSPTTCFGQERWSFPSEISIQIAILSLNATACLPRNSQLAHHSKRIKTVALRPPSVWKLI

SEQ ID NO: 2205 - protein, 18 aa, synthetic construct
  REGION 1..18: note = ATaRI peptide
IQGERHPQVREENTEGGI

SEQ ID NO: 2206 - protein, 67 aa, synthetic construct
  REGION 1..67: note = ATaRI peptide
HIALYAAVRYDSPGDGCGGGFVYLIRAHGLKSKALSHLLSEPMKLTAGLSSSPFWPCCSLHLTMSSR

SEQ ID NO: 2207 - protein, 37 aa, synthetic construct
  REGION 1..37: note = ATaRI peptide
AAKEGKIEVSGCPLPTSPLQEAVGLIPKFLQKEPRGW

SEQ ID NO: 2208 - protein, 74 aa, synthetic construct
  REGION 1..74: note = ATaRI peptide
KRAFPRKRVSSWGWAAPQGWLGGGSACTPCAKSPPHRPGMCSCQASLQPPPLHSDFLRAGLSPAASYQSLLRLC

SEQ ID NO: 2209 - protein, 17 aa, synthetic construct
  REGION 1..17: note = ATaRI peptide
TKQYEDGQVSVQGCRGP

SEQ ID NO: 2210 - protein, 24 aa, synthetic construct
  REGION 1..24: note = ATaRI peptide
LLGVAHFKGERVSNSFSFILLYFN

SEQ ID NO: 2211 - protein, 54 aa, synthetic construct
  REGION 1..54: note = ATaRI peptide
GHEGGRGHGKRPAQPGWGVWGSKGQAGRQSGSPLFLVLQCGPNVSAVSGQSAES

SEQ ID NO: 2212 - protein, 38 aa, synthetic construct
  REGION 1..38: note = ATaRI peptide
LKIKGLTEVSTCSHKPALESLWCAPQAHWGSGQAVSTP

SEQ ID NO: 2213 - protein, 18 aa, synthetic construct
  REGION 1..18: note = ATaRI peptide
EDVDRKHWVSKSDLCWVI

SEQ ID NO: 2214 - protein, 59 aa, synthetic construct
  REGION 1..59: note = ATaRI peptide
DYVFMRWKVSSHQVALQTPSKPGPVSHLHIHSNQGLPMSSARHSWLSWQSLHGRVFARL

SEQ ID NO: 2215 - protein, 9 aa, synthetic construct
  REGION 1..9: note = ATaRI peptide
RKPNSVVIR

SEQ ID NO: 2216 - protein, 55 aa, synthetic construct
  REGION 1..55: note = ATaRI peptide
FADTFLRDGKAGAGAGTGQGLGGLASIGHLGDGWWQGRWWDCTFQEVAGHGGSSL

SEQ ID NO: 2217 - protein, 214 aa, synthetic construct
  REGION 1..214: note = ATaRI peptide
SGSLLACRGNWFQVVGKGLGQIGMRYIGVVEPESGSLASRQGPVPTTVLLLASHPPLWFLFPCLSCEGVAVPRWLPIPICPRAVSALLGKVFIFIFIFLQRSLALVPQAGVQWRDLGSLQSPPPGFKQFSCLTVLSSWDYRRLPPHPANFSIFSRDRVSPCWPGWSGTPDLRWSAHLSLPKCWDYRCEPPCLAGKFLKSWIPESQALEVLIRLV

SEQ ID NO: 2218 - protein, 30 aa, synthetic construct
  REGION 1..30: note = ATaRI peptide
IKPILQVIVSTCVCYVPCQLLWSHRITSYV

SEQ ID NO: 2219 - protein, 15 aa, synthetic construct
  REGION 1..15: note = ATaRI peptide
SDGLNTLSCEYGVSI

SEQ ID NO: 2220 - protein, 51 aa, synthetic construct
  REGION 1..51: note = ATaRI peptide
PQNGSSGMGEMPHGACADQGCQTSESCFEVESGTKGSFPNAIHYRVVSWKE

SEQ ID NO: 2221 - protein, 16 aa, synthetic construct
  REGION 1..16: note = ATaRI peptide
SLELVDESVSVCHAGE

SEQ ID NO: 2222 - protein, 16 aa, synthetic construct
  REGION 1..16: note = ATaRI peptide
HWVFESRKVKCLFCFK

SEQ ID NO: 2223 - protein, 9 aa, synthetic construct
  REGION 1..9: note = ATaRI peptide
PEAYKLRGW

SEQ ID NO: 2224 - protein, 9 aa, synthetic construct
  REGION 1..9: note = ATaRI peptide
VFIIQTVSK

SEQ ID NO: 2225 - protein, 31 aa, synthetic construct
  REGION 1..31: note = ATaRI peptide
LASMMCKAGKNGRCFTINWGPGSFIYLFSLF

SEQ ID NO: 2226 - protein, 10 aa, synthetic construct
  REGION 1..10: note = ATaRI peptide
LLQYIQEEVS

SEQ ID NO: 2227 - protein, 54 aa, synthetic construct
  REGION 1..54: note = ATaRI peptide
YRYMPPCPGNFGIIIIIIIIIIIIIFFFFFFFFFFFSRDRVSPCWPGWPRTDCK

SEQ ID NO: 2228 - protein, 20 aa, synthetic construct
  REGION 1..20: note = ATaRI peptide
YLGELKDKVSHIFYYNFYNF

SEQ ID NO: 2229 - protein, 28 aa, synthetic construct
  REGION 1..28: note = ATaRI peptide
IEESAIDEVTGSGCVWVQLPGLLAHLDL

SEQ ID NO: 2230 - protein, 18 aa, synthetic construct
  REGION 1..18: note = ATaRI peptide
MSREVAEQVSAPGRSALH

SEQ ID NO: 2231 - protein, 27 aa, synthetic construct
  REGION 1..27: note = ATaRI peptide
LTASHATKVSQGRAFHGEGVQAVFCRH

SEQ ID NO: 2232 - protein, 141 aa, synthetic construct
  REGION 1..141: note = ATaRI peptide
ASSLSGSTVRRPRPAPTFCLRASGARRGRPLAGCLSPARPRPGSGPPPGKAVASARRGVVPGGRSSGRGPGCARGQVGARPALREVERAGRGQTSRESRGQGGQGPLERQRQELGQRGSPVSAAGDPHLLRPTCSRLLGTH

SEQ ID NO: 2233 - protein, 69 aa, synthetic construct
  REGION 1..69: note = ATaRI peptide
FYGALFREVRPCMMQLGISTSHPSVACNPLSLSPSSTPGAGDTWHTGRRLPRLLAVTVLLSASVSLSVK

SEQ ID NO: 2234 - protein, 36 aa, synthetic construct
  REGION 1..36: note = ATaRI peptide
ILGEIAVSVSGLGGLAGGPRCIGRGPALPAGMEPAY

SEQ ID NO: 2235 - protein, 42 aa, synthetic construct
  REGION 1..42: note = ATaRI peptide
SKLSVIHRGQCPAATQARCSQWEGSQAKAGGRLPMSNCGSER

SEQ ID NO: 2236 - protein, 70 aa, synthetic construct
  REGION 1..70: note = ATaRI peptide
AGCKPYMAVSGPQAPQAQERMGRGEICPGWPPRPYPLSVGAEPPHTAFPAVVGPPVSCCPGAALLYPVVN

SEQ ID NO: 2237 - protein, 33 aa, synthetic construct
  REGION 1..33: note = ATaRI peptide
SVIRLQKKVTKSFFFKISCIQLYKLSENNILLH

SEQ ID NO: 2238 - protein, 16 aa, synthetic construct
  REGION 1..16: note = ATaRI peptide
NGDILMEFGWVQHELF

SEQ ID NO: 2239 - protein, 9 aa, synthetic construct
  REGION 1..9: note = ATaRI peptide
TDGSVLAAG

SEQ ID NO: 2240 - protein, 9 aa, synthetic construct
  REGION 1..9: note = ATaRI peptide
DIGLSVTHR

SEQ ID NO: 2241 - protein, 26 aa, synthetic construct
  REGION 1..26: note = ATaRI peptide
LPKALTKKVRWVMLGRTPFCHWPSFL

SEQ ID NO: 2242 - protein, 13 aa, synthetic construct
  REGION 1..13: note = ATaRI peptide
VFLYQILRGKISL

SEQ ID NO: 2243 - protein, 14 aa, synthetic construct
  REGION 1..14: note = ATaRI peptide
VNSNCVLKVAFQFI

SEQ ID NO: 2244 - protein, 9 aa, synthetic construct
  REGION 1..9: note = ATaRI peptide
SAAFKSFIR

SEQ ID NO: 2245 - protein, 50 aa, synthetic construct
  REGION 1..50: note = ATaRI peptide
MKRKQQRTSECASHHLCAPCILAVLPVQDSGHRMHMCQSPSGSGDSALRC

SEQ ID NO: 2246 - protein, 9 aa, synthetic construct
  REGION 1..9: note = ATaRI peptide
GYQPRGKPR

SEQ ID NO: 2247 - protein, 9 aa, synthetic construct
  REGION 1..9: note = ATaRI peptide
LPLPSQDAG

SEQ ID NO: 2248 - protein, 24 aa, synthetic construct
  REGION 1..24: note = ATaRI peptide
YLREHTAWVGICSPLVAVLADFGL

SEQ ID NO: 2249 - protein, 9 aa, synthetic construct
  REGION 1..9: note = ATaRI peptide
SPTLQSNEW

SEQ ID NO: 2250 - protein, 67 aa, synthetic construct
  REGION 1..67: note = ATaRI peptide
VEAQEEEEVRDKKMTPILNFHFWFLSLCSLPCHNLPYIPRVSRLYFLNTGPIKSQLGIKKGPFFLEK

SEQ ID NO: 2251 - protein, 19 aa, synthetic construct
  REGION 1..19: note = ATaRI peptide
HQAAMEKEVAYSVLLLCLF

SEQ ID NO: 2252 - protein, 9 aa, synthetic construct
  REGION 1..9: note = ATaRI peptide
PKCSFREAR

SEQ ID NO: 2253 - protein, 18 aa, synthetic construct
  REGION 1..18: note = ATaRI peptide
SLITLIEKVKVDDWNVGV

SEQ ID NO: 2254 - protein, 42 aa, synthetic construct
  REGION 1..42: note = ATaRI peptide
SLLSMLVEVSLFLLTRGKLPGICSVKTFIKTLSFTKNVYYLF

SEQ ID NO: 2255 - protein, 19 aa, synthetic construct
  REGION 1..19: note = ATaRI peptide
RELVVTVSGKDILIFSSKS

SEQ ID NO: 2256 - protein, 14 aa, synthetic construct
  REGION 1..14: note = ATaRI peptide
GIIVRWCKVCNSEF

SEQ ID NO: 2257 - protein, 16 aa, synthetic construct
  REGION 1..16: note = ATaRI peptide
DGETISLPGKVISITF

SEQ ID NO: 2258 - protein, 61 aa, synthetic construct
  REGION 1..61: note = ATaRI peptide
FVYHESGKVRCLELPPPPPARTPGLGRCSSPPPLLTGAVLSCLLRFSATICLNLSLPPSLR

SEQ ID NO: 2259 - protein, 19 aa, synthetic construct
  REGION 1..19: note = ATaRI peptide
QSMVVDLKVTCLFFLYYKL

SEQ ID NO: 2260 - protein, 12 aa, synthetic construct
  REGION 1..12: note = ATaRI peptide
SVSNMMSTGKCE

SEQ ID NO: 2261 - protein, 9 aa, synthetic construct
  REGION 1..9: note = ATaRI peptide
DDDVKCLTR

SEQ ID NO: 2262 - protein, 9 aa, synthetic construct
  REGION 1..9: note = ATaRI peptide
EAKSQLFLK

SEQ ID NO: 2263 - protein, 9 aa, synthetic construct
  REGION 1..9: note = ATaRI peptide
KSNFDAARR

SEQ ID NO: 2264 - protein, 9 aa, synthetic construct
  REGION 1..9: note = ATaRI peptide
IGQYLSSNR

SEQ ID NO: 2265 - protein, 9 aa, synthetic construct
  REGION 1..9: note = ATaRI peptide
LGSSDPSLR

SEQ ID NO: 2266 - protein, 78 aa, synthetic construct
  REGION 1..78: note = ATaRI peptide
KIWGSLGQVLSLLKYLSSISFVHIFIWCHIGQSTALDTRDRVVKNTVSSFRKHVDTHPALHLVQNCKCLVHVSEPEKS

SEQ ID NO: 2267 - protein, 72 aa, synthetic construct
  REGION 1..72: note = ATaRI peptide
SLRIFNDKVSKLCLEVPRLLKFSTLPSFLVAILLKSQEVHNLSRNLYNVTYCEYISLPAHKELCKLECIFFT

SEQ ID NO: 2268 - protein, 9 aa, synthetic construct
  REGION 1..9: note = ATaRI peptide
IHHGDPSYR

SEQ ID NO: 2269 - protein, 55 aa, synthetic construct
  REGION 1..55: note = ATaRI peptide
APGHTLSGVSFRRWIRGPRLGEESLEAALPWLPSPGREFSWRNGALGPSLTPRGL

SEQ ID NO: 2270 - protein, 9 aa, synthetic construct
  REGION 1..9: note = ATaRI peptide
WNLHVMKHG

SEQ ID NO: 2271 - protein, 9 aa, synthetic construct
  REGION 1..9: note = ATaRI peptide
ESLPFLQYM

SEQ ID NO: 2272 - protein, 9 aa, synthetic construct
  REGION 1..9: note = ATaRI peptide
FELPALKYL

SEQ ID NO: 2273 - protein, 31 aa, synthetic construct
  REGION 1..31: note = ATaRI peptide
QKEQKSSEVRTTQKHETQISHHLAYARRVPT

SEQ ID NO: 2274 - protein, 18 aa, synthetic construct
  REGION 1..18: note = ATaRI peptide
VSEEFPEEVNILISIFKF

SEQ ID NO: 2275 - protein, 20 aa, synthetic construct
  REGION 1..20: note = ATaRI peptide
PTHIVDYSGNEYPLVDEGVG

SEQ ID NO: 2276 - protein, 9 aa, synthetic construct
  REGION 1..9: note = ATaRI peptide
YQGFLSQWT

SEQ ID NO: 2277 - protein, 9 aa, synthetic construct
  REGION 1..9: note = ATaRI peptide
HGPLFLEAR

SEQ ID NO: 2278 - protein, 19 aa, synthetic construct
  REGION 1..19: note = ATaRI peptide
TFLRQALEVGFTLVLISGL

SEQ ID NO: 2279 - protein, 47 aa, synthetic construct
  REGION 1..47: note = ATaRI peptide
LRPLGLAKVEREDQKWSRKLSLASLSESGRHFRNPLPSSSWRILLIL

SEQ ID NO: 2280 - protein, 12 aa, synthetic construct
  REGION 1..12: note = ATaRI peptide
PRKFSGFSGKIG

SEQ ID NO: 2281 - protein, 9 aa, synthetic construct
  REGION 1..9: note = ATaRI peptide
LKPVLPHKV

SEQ ID NO: 2282 - protein, 65 aa, synthetic construct
  REGION 1..65: note = ATaRI peptide
DFIVPDPKVSTQWLGGLQLIELACRFSSAIENPSHLAESPPRDRGLDFQLSDRHRDNQTTLRNFE

SEQ ID NO: 2283 - protein, 31 aa, synthetic construct
  REGION 1..31: note = ATaRI peptide
PKDDREAQRSVCFPGYFLVVLPDAVSSGVCY

SEQ ID NO: 2284 - protein, 24 aa, synthetic construct
  REGION 1..24: note = ATaRI peptide
NINLIVQKRLGNSEVLIKVFVILH

SEQ ID NO: 2285 - protein, 19 aa, synthetic construct
  REGION 1..19: note = ATaRI peptide
DYGPRTDAGKVYGGLSLCH

SEQ ID NO: 2286 - protein, 9 aa, synthetic construct
  REGION 1..9: note = ATaRI peptide
GYGGKMGGR

SEQ ID NO: 2287 - protein, 13 aa, synthetic construct
  REGION 1..13: note = ATaRI peptide
TILELPDEVSNQS

SEQ ID NO: 2288 - protein, 23 aa, synthetic construct
  REGION 1..23: note = ATaRI peptide
AQLKQFIQVIVFSISVFNGVCVF

SEQ ID NO: 2289 - protein, 30 aa, synthetic construct
  REGION 1..30: note = ATaRI peptide
DDLTGFLQVMRGKRGRNRCEPSSASSRGRS

SEQ ID NO: 2290 - protein, 9 aa, synthetic construct
  REGION 1..9: note = ATaRI peptide
DGTKPNAGR

SEQ ID NO: 2291 - protein, 19 aa, synthetic construct
  REGION 1..19: note = ATaRI peptide
ADTAIPFHCKCLPILIRYT

SEQ ID NO: 2292 - protein, 11 aa, synthetic construct
  REGION 1..11: note = ATaRI peptide
LINLRKFQCKY

SEQ ID NO: 2293 - protein, 10 aa, synthetic construct
  REGION 1..10: note = ATaRI peptide
VFGLVVSAGG

SEQ ID NO: 2294 - protein, 15 aa, synthetic construct
  REGION 1..15: note = ATaRI peptide
RSIHLACTGEVFLGP

SEQ ID NO: 2295 - protein, 14 aa, synthetic construct
  REGION 1..14: note = ATaRI peptide
LVTEHCFPVSSHPP

SEQ ID NO: 2296 - protein, 22 aa, synthetic construct
  REGION 1..22: note = ATaRI peptide
TVRMHTRQVEALVCLPPSFFSL

SEQ ID NO: 2297 - protein, 27 aa, synthetic construct
  REGION 1..27: note = ATaRI peptide
HIPDLPLPKYNGVVRFGTGMSKGVVGR

SEQ ID NO: 2298 - protein, 58 aa, synthetic construct
  REGION 1..58: note = ATaRI peptide
HHERGQKKVEVLPHLPSLPHGDLETHKHGSKSHHEVPLRSWPCLLPSSEATEGRRGLK

SEQ ID NO: 2299 - protein, 37 aa, synthetic construct
  REGION 1..37: note = ATaRI peptide
MDVPSKYKVGPWAFQKMSVCVWVCQTVCAAQPLVRAG

SEQ ID NO: 2300 - protein, 37 aa, synthetic construct
  REGION 1..37: note = ATaRI peptide
ELAQLELIRYSCTCALECPGVIGILILQFLTLSSHSE

SEQ ID NO: 2301 - protein, 9 aa, synthetic construct
  REGION 1..9: note = ATaRI peptide
RRLREEFSL

SEQ ID NO: 2302 - protein, 9 aa, synthetic construct
  REGION 1..9: note = ATaRI peptide
CGSDPEENR

SEQ ID NO: 2303 - protein, 18 aa, synthetic construct
  REGION 1..18: note = ATaRI peptide
WKQRRKFLVRRKGAWGEQ

SEQ ID NO: 2304 - protein, 25 aa, synthetic construct
  REGION 1..25: note = ATaRI peptide
PNPSDLLEVGNQEHSIEESKRLNRM

SEQ ID NO: 2305 - protein, 16 aa, synthetic construct
  REGION 1..16: note = ATaRI peptide
FLQPRELRGRYHRIGG

SEQ ID NO: 2306 - protein, 20 aa, synthetic construct
  REGION 1..20: note = ATaRI peptide
PPPPTFHQVGSPSIRLSQNL

SEQ ID NO: 2307 - protein, 10 aa, synthetic construct
  REGION 1..10: note = ATaRI peptide
ITTVRSFLGE

SEQ ID NO: 2308 - protein, 126 aa, synthetic construct
  REGION 1..126: note = ATaRI peptide
KAACLDILVRVCTLAPRHCPCVLGRCPSSQTATLLNVCLQSTCPNAHRPNVCPSSPHMSTCPLVSLSTQPPSSQMCRSSPVHPYTYPATQPSIHLASNKDSRRSQVQWLIPVIPALWEAERGRRIT

SEQ ID NO: 2309 - protein, 79 aa, synthetic construct
  REGION 1..79: note = ATaRI peptide
SAICLICGGGQGAWVWGLGWDGGAALESLPGSSFRPPLLGISRGQGLVCNYTARGPCGAWTPVPDFWATPLLGRLRVRV

SEQ ID NO: 2310 - protein, 48 aa, synthetic construct
  REGION 1..48: note = ATaRI peptide
DLRSISAKGEAHRPGGVPAPDTWPRPPHPSQHPMSLCQDNTTPVPICV

SEQ ID NO: 2311 - protein, 9 aa, synthetic construct
  REGION 1..9: note = ATaRI peptide
SRLWCSQKR

SEQ ID NO: 2312 - protein, 9 aa, synthetic construct
  REGION 1..9: note = ATaRI peptide
NLERFSFVT

SEQ ID NO: 2313 - protein, 25 aa, synthetic construct
  REGION 1..25: note = ATaRI peptide
CEEMDRKLRMCTLVLCNVPLMNHLS

SEQ ID NO: 2314 - protein, 9 aa, synthetic construct
  REGION 1..9: note = ATaRI peptide
GRGTPLRLG

SEQ ID NO: 2315 - protein, 9 aa, synthetic construct
  REGION 1..9: note = ATaRI peptide
RPMFTYNWT

SEQ ID NO: 2316 - protein, 29 aa, synthetic construct
  REGION 1..29: note = ATaRI peptide
THSEDADEVRSRGVGFLSFHLGSALVLCT

SEQ ID NO: 2317 - protein, 16 aa, synthetic construct
  REGION 1..16: note = ATaRI peptide
ISELRNQYVSNLSPCP

SEQ ID NO: 2318 - protein, 21 aa, synthetic construct
  REGION 1..21: note = ATaRI peptide
YLDEENEEVKYIMALIARCSE

SEQ ID NO: 2319 - protein, 9 aa, synthetic construct
  REGION 1..9: note = ATaRI peptide
TPEDPAVQV

SEQ ID NO: 2320 - protein, 12 aa, synthetic construct
  REGION 1..12: note = ATaRI peptide
DDLTCQQEVSID

SEQ ID NO: 2321 - protein, 24 aa, synthetic construct
  REGION 1..24: note = ATaRI peptide
VELPPSLPRYHSQPPQLGCSSEVK

SEQ ID NO: 2322 - protein, 9 aa, synthetic construct
  REGION 1..9: note = ATaRI peptide
RQKSYDHSR

SEQ ID NO: 2323 - protein, 21 aa, synthetic construct
  REGION 1..21: note = ATaRI peptide
LGINDKDLGELGEVPGTSVWD

SEQ ID NO: 2324 - protein, 13 aa, synthetic construct
  REGION 1..13: note = ATaRI peptide
QPDNPSVRVLIPF

SEQ ID NO: 2325 - protein, 50 aa, synthetic construct
  REGION 1..50: note = ATaRI peptide
PEKWEIKQVGAFSFHDQIVIQHVAWCLGVCPGARWPGITFGHCISLFSHS

SEQ ID NO: 2326 - protein, 10 aa, synthetic construct
  REGION 1..10: note = ATaRI peptide
LPKVDDEEGN

SEQ ID NO: 2327 - protein, 25 aa, synthetic construct
  REGION 1..25: note = ATaRI peptide
MSPIKIVKVRITGPLTWKCQVDFFF

SEQ ID NO: 2328 - protein, 9 aa, synthetic construct
  REGION 1..9: note = ATaRI peptide
LVVTPISQV

SEQ ID NO: 2329 - protein, 36 aa, synthetic construct
  REGION 1..36: note = ATaRI peptide
LLTRLGRRVRDRLNFLCFWEDSLVSLSHPSVCTKSG

SEQ ID NO: 2330 - protein, 101 aa, synthetic construct
  REGION 1..101: note = ATaRI peptide
TLGSMHHTRWVFLVPEYQGLVTGQSPPHRGPAGQIWEWPCVCSLGKVYSGNVAQRRETRSVHPFYFVFFIRTEEFNLKKKGRCQGCEGHPLLLKGRRRPIC

SEQ ID NO: 2331 - protein, 32 aa, synthetic construct
  REGION 1..32: note = ATaRI peptide
SLPSSQDYRCAPRHPANFFIICRHGVSLHYSG

SEQ ID NO: 2332 - protein, 9 aa, synthetic construct
  REGION 1..9: note = ATaRI peptide
DYSPEFLLW

SEQ ID NO: 2333 - protein, 9 aa, synthetic construct
  REGION 1..9: note = ATaRI peptide
RACPGPLSR

SEQ ID NO: 2334 - protein, 82 aa, synthetic construct
  REGION 1..82: note = ATaRI peptide
EERFNRALVSATRRRVGRGRGAAGARQGLGARPRPRGLRCRLEIPGPAAAPSRRWERQWPFFQSDLALSPQNFLQLSPGLPP

SEQ ID NO: 2335 - protein, 37 aa, synthetic construct
  REGION 1..37: note = ATaRI peptide
MLIEMSLQVRYFVLRMTQTEQSFRTHQEGSVFPLPRF

SEQ ID NO: 2336 - protein, 9 aa, synthetic construct
  REGION 1..9: note = ATaRI peptide
DTNLASSTM

SEQ ID NO: 2337 - protein, 13 aa, synthetic construct
  REGION 1..13: note = ATaRI peptide
YLHSKELSGNKRF

SEQ ID NO: 2338 - protein, 32 aa, synthetic construct
  REGION 1..32: note = ATaRI peptide
ALKTVDIDGKFYLFSISLRVCNHKYVCQINYK

SEQ ID NO: 2339 - protein, 26 aa, synthetic construct
  REGION 1..26: note = ATaRI peptide
IVTDTSRNGERLITLKFLRKLDIFIG

SEQ ID NO: 2340 - protein, 10 aa, synthetic construct
  REGION 1..10: note = ATaRI peptide
ERSFPECNGR

SEQ ID NO: 2341 - protein, 10 aa, synthetic construct
  REGION 1..10: note = ATaRI peptide
ITELTEAGGE

SEQ ID NO: 2342 - protein, 13 aa, synthetic construct
  REGION 1..13: note = ATaRI peptide
DRVALSNMVCMCL

SEQ ID NO: 2343 - protein, 36 aa, synthetic construct
  REGION 1..36: note = ATaRI peptide
EERRRVEEVGCLRRAQAWRGLLLTCPGSIRALENRF

SEQ ID NO: 2344 - protein, 58 aa, synthetic construct
  REGION 1..58: note = ATaRI peptide
TERARQVLVCNFGTVQKRQAGPSWEDVGSTNAGTSALLCWPSALKATAAMLEGSPALL

SEQ ID NO: 2345 - protein, 61 aa, synthetic construct
  REGION 1..61: note = ATaRI peptide
DDIGHGIKVERGALLFPSNPPSRALWPLSLQNPSSASFVPTCHSFLSPLPETTTLSSSPSP

SEQ ID NO: 2346 - protein, 59 aa, synthetic construct
  REGION 1..59: note = ATaRI peptide
EELSPPPPGKEVHPLLPNRGVAFLPPATPQPTSLGSAPASLSECLLQGAQHRGERRQRK

SEQ ID NO: 2347 - protein, 22 aa, synthetic construct
  REGION 1..22: note = ATaRI peptide
PQAVDVIPVLLILMELWGLEVE

SEQ ID NO: 2348 - protein, 41 aa, synthetic construct
  REGION 1..41: note = ATaRI peptide
NLSADECKVIVLSFIQHMLIECLPFARHFAEHWGYSGQQDG

SEQ ID NO: 2349 - protein, 20 aa, synthetic construct
  REGION 1..20: note = ATaRI peptide
NRHATRHQVWALLKHWPFIV

SEQ ID NO: 2350 - protein, 38 aa, synthetic construct
  REGION 1..38: note = ATaRI peptide
QARASEDLVSIKTSKLKAACERCLELPGKMIANQFDGN

SEQ ID NO: 2351 - protein, 24 aa, synthetic construct
  REGION 1..24: note = ATaRI peptide
QTILRRHMVSCLGFLCLDHDGNKL

SEQ ID NO: 2352 - protein, 43 aa, synthetic construct
  REGION 1..43: note = ATaRI peptide
HLIGYFSKVSRIWRLRSQWPEQGDPCSQLGAQITDRKKLYSGQ

SEQ ID NO: 2353 - protein, 43 aa, synthetic construct
  REGION 1..43: note = ATaRI peptide
GLSASALEGRGSREGQLRDAPWPTPSLLTCLCPVLEPGRDHTL

SEQ ID NO: 2354 - protein, 42 aa, synthetic construct
  REGION 1..42: note = ATaRI peptide
KAKSETVLVSGQGEVGGDCIHPITGCLGTRGTQSKGDLSVMR

SEQ ID NO: 2355 - protein, 13 aa, synthetic construct
  REGION 1..13: note = ATaRI peptide
VWNSTFIEVSAWV

SEQ ID NO: 2356 - protein, 36 aa, synthetic construct
  REGION 1..36: note = ATaRI peptide
SHLSKLKMVSGSGISYRWGWALGILLLFFNLIKLIN

SEQ ID NO: 2357 - protein, 27 aa, synthetic construct
  REGION 1..27: note = ATaRI peptide
PLVVGVTMVSVGPWESGWGRSPLGCGL

SEQ ID NO: 2358 - protein, 19 aa, synthetic construct
  REGION 1..19: note = ATaRI peptide
KILLAKAEVRLGERGTCQV

SEQ ID NO: 2359 - protein, 31 aa, synthetic construct
  REGION 1..31: note = ATaRI peptide
QLISNLTQVTLGRAGGSTGVGTGCWGQGRVT

SEQ ID NO: 2360 - protein, 111 aa, synthetic construct
  REGION 1..111: note = ATaRI peptide
VERKTISPGLESPYLGCLPQSLLQKNLCFKLFLCSLLTPFLLPLFTSASTLTSSLFRVLCSPPPSSTGLPTSLSSSLFPRIPSPWPRLLPCPPFPCPPASLQATPSLELPP

SEQ ID NO: 2361 - protein, 72 aa, synthetic construct
  REGION 1..72: note = ATaRI peptide
QDLPPTLHRYQLLPLPSQLPTVGWKFRSIAAPCKAFDQECRKSFSLPGGCLEGRRAWFCRWRVGDQNPDPCL

SEQ ID NO: 2362 - protein, 30 aa, synthetic construct
  REGION 1..30: note = ATaRI peptide
SQLTIIPQVGAWHGLATLTNGPGGRPHLVL

SEQ ID NO: 2363 - protein, 15 aa, synthetic construct
  REGION 1..15: note = ATaRI peptide
TGSGFGGTRYHRRQG

SEQ ID NO: 2364 - protein, 23 aa, synthetic construct
  REGION 1..23: note = ATaRI peptide
ELLRSTTSVSKPYFTLSHLSVNS

SEQ ID NO: 2365 - protein, 23 aa, synthetic construct
  REGION 1..23: note = ATaRI peptide
KATVEELKVSFFVCFEADSCSVT

SEQ ID NO: 2366 - protein, 11 aa, synthetic construct
  REGION 1..11: note = ATaRI peptide
RSRERRRSRYI

SEQ ID NO: 2367 - protein, 26 aa, synthetic construct
  REGION 1..26: note = ATaRI peptide
HKGRTFPQGQLEPTVLAQFSQVDRQT

SEQ ID NO: 2368 - protein, 9 aa, synthetic construct
  REGION 1..9: note = ATaRI peptide
NLKKRLKEE

SEQ ID NO: 2369 - protein, 84 aa, synthetic construct
  REGION 1..84: note = ATaRI peptide
SLPRGILKVRVSEVGGSYLTTYLCSLICFPVADVWIPIICGVKYVCCHFALVNTYVIVFFFSFCKKCSRGIMFLLLELRSLKLR

SEQ ID NO: 2370 - protein, 46 aa, synthetic construct
  REGION 1..46: note = ATaRI peptide
DNAVSLFQVCIFIYLFISNALFLFKDQTFATPNAKILKKIFIAKTS

SEQ ID NO: 2371 - protein, 9 aa, synthetic construct
  REGION 1..9: note = ATaRI peptide
RNGQYVACG

SEQ ID NO: 2372 - protein, 95 aa, synthetic construct
  REGION 1..95: note = ATaRI peptide
PGPASQPDGEAPTMAGAAGAACPASASREDFGAGRRRQGRAQAPGVTPPGGGGGARAAAREGGAGAPAAVAGEGAGGAGAALAGGQREGRGEAAG

SEQ ID NO: 2373 - protein, 9 aa, synthetic construct
  REGION 1..9: note = ATaRI peptide
NLENEMKKV

SEQ ID NO: 2374 - protein, 19 aa, synthetic construct
  REGION 1..19: note = ATaRI peptide
KLRKELHEGKYTVYFYLCL

SEQ ID NO: 2375 - protein, 9 aa, synthetic construct
  REGION 1..9: note = ATaRI peptide
SAQLSNEEV

SEQ ID NO: 2376 - protein, 9 aa, synthetic construct
  REGION 1..9: note = ATaRI peptide
DIINTTQDG

SEQ ID NO: 2377 - protein, 14 aa, synthetic construct
  REGION 1..14: note = ATaRI peptide
KEIQLTLSVSTLIL

SEQ ID NO: 2378 - protein, 25 aa, synthetic construct
  REGION 1..25: note = ATaRI peptide
NRILNFIKVSLLYTSWDGKFLRLGI

SEQ ID NO: 2379 - protein, 55 aa, synthetic construct
  REGION 1..55: note = ATaRI peptide
EAETARQEVGGLSLTHGDYSSVSLGSFLITGDNPKSTQLKQKDEVIRRILQYLIE

SEQ ID NO: 2380 - protein, 39 aa, synthetic construct
  REGION 1..39: note = ATaRI peptide
ADYSDQNKVSKAVISSSYHGFLAVVMYPVFIFFSSALLN

SEQ ID NO: 2381 - protein, 15 aa, synthetic construct
  REGION 1..15: note = ATaRI peptide
NRDVSFPQGTHSLAL

SEQ ID NO: 2382 - protein, 57 aa, synthetic construct
  REGION 1..57: note = ATaRI peptide
SDGKKGSKGKTHGACQCTQPGVPHGRARLMGGHVEYMKRIPEGQRTGKAAEQTRIST

SEQ ID NO: 2383 - protein, 43 aa, synthetic construct
  REGION 1..43: note = ATaRI peptide
DAEADHSGGRRVSGSFRGWGAPSISWRKAASLPLPSATCAAKS

SEQ ID NO: 2384 - protein, 39 aa, synthetic construct
  REGION 1..39: note = ATaRI peptide
RQFRPLTYRSAAPDPASAGTLGCFHLSHGERPRISRVAL

SEQ ID NO: 2385 - protein, 19 aa, synthetic construct
  REGION 1..19: note = ATaRI peptide
IWEIEVPKVGAESPRLVLW

SEQ ID NO: 2386 - protein, 26 aa, synthetic construct
  REGION 1..26: note = ATaRI peptide
HHELDSKTVGCFLLLLFAPFQERSGH

SEQ ID NO: 2387 - protein, 56 aa, synthetic construct
  REGION 1..56: note = ATaRI peptide
SGFGHGIAVSTCLPLPSCLLLPDQLLVACGCARKAQHRGQRRGQRVPINITPAPEG

SEQ ID NO: 2388 - protein, 42 aa, synthetic construct
  REGION 1..42: note = ATaRI peptide
IAEKHKGEGKLVNDLLFFCINKSNLHLCPSETSATLHLECEA

SEQ ID NO: 2389 - protein, 10 aa, synthetic construct
  REGION 1..10: note = ATaRI peptide
QALLVPALGG

SEQ ID NO: 2390 - protein, 38 aa, synthetic construct
  REGION 1..38: note = ATaRI peptide
SKHISHRGGERGPQNPMTEVGEAEGPLRLRKRQPGANP

SEQ ID NO: 2391 - protein, 57 aa, synthetic construct
  REGION 1..57: note = ATaRI peptide
RFDDCSSKVQKSCWYLFLFFYGTGSCSVAQPGVRGAIMALCSLYLLGSSDLLPQPLG

SEQ ID NO: 2392 - protein, 9 aa, synthetic construct
  REGION 1..9: note = ATaRI peptide
TSLTIDGIR

SEQ ID NO: 2393 - protein, 9 aa, synthetic construct
  REGION 1..9: note = ATaRI peptide
LYQCDAIDR

SEQ ID NO: 2394 - protein, 32 aa, synthetic construct
  REGION 1..32: note = ATaRI peptide
IALKGIKECGFSLKLFLCFCFFLFFFCLFVCF

SEQ ID NO: 2395 - protein, 11 aa, synthetic construct
  REGION 1..11: note = ATaRI peptide
LLTGISAQVTF

SEQ ID NO: 2396 - protein, 22 aa, synthetic construct
  REGION 1..22: note = ATaRI peptide
YVEGVHQQVRGRAILFLVLHIL

SEQ ID NO: 2397 - protein, 13 aa, synthetic construct
  REGION 1..13: note = ATaRI peptide
FGILACASVSELY

SEQ ID NO: 2398 - protein, 42 aa, synthetic construct
  REGION 1..42: note = ATaRI peptide
YLILEYLSGQYTEFGVIICICSRNWVKMLFFNGRILFPIMIK

SEQ ID NO: 2399 - protein, 15 aa, synthetic construct
  REGION 1..15: note = ATaRI peptide
EPPFKPLLVSIHESV

SEQ ID NO: 2400 - protein, 65 aa, synthetic construct
  REGION 1..65: note = ATaRI peptide
ELQPGSRKRECASLFLSFVRLSHPLWLPIPHNLSMKLPGAEPVPTSALPSLLPSLDRLLAGQGWG

SEQ ID NO: 2401 - protein, 26 aa, synthetic construct
  REGION 1..26: note = ATaRI peptide
CSGFCSQKVRPSDHFTTLSFKCVWWS

SEQ ID NO: 2402 - protein, 22 aa, synthetic construct
  REGION 1..22: note = ATaRI peptide
FDGTLYNKGKSKLQGTMEGSSR

SEQ ID NO: 2403 - protein, 48 aa, synthetic construct
  REGION 1..48: note = ATaRI peptide
ADRNWKSKGNQGPCGGGGRLVSTGRLLIRMQDQFTQVGTAGCRISIHR

SEQ ID NO: 2404 - protein, 44 aa, synthetic construct
  REGION 1..44: note = ATaRI peptide
QRVCQEKQGALKWALIGINSQRTAERALPERPGNRGRPDPLFLA

SEQ ID NO: 2405 - protein, 9 aa, synthetic construct
  REGION 1..9: note = ATaRI peptide
VLSAIVPDK

SEQ ID NO: 2406 - protein, 39 aa, synthetic construct
  REGION 1..39: note = ATaRI peptide
SLSDKEVEVRSYVHGRTFHTCTFGPGLVAQGCNPSTLGG

SEQ ID NO: 2407 - protein, 25 aa, synthetic construct
  REGION 1..25: note = ATaRI peptide
AEPYETSQGSNNFVSTKVLNSNVLR

SEQ ID NO: 2408 - protein, 13 aa, synthetic construct
  REGION 1..13: note = ATaRI peptide
KTNGAENETYVLY

SEQ ID NO: 2409 - protein, 9 aa, synthetic construct
  REGION 1..9: note = ATaRI peptide
ALGAHSLLR

SEQ ID NO: 2410 - protein, 72 aa, synthetic construct
  REGION 1..72: note = ATaRI peptide
GDYLRVWRVSGCFISSQTSGLSQPQLLAVKSHRTDRGQRQRVSLQHRRSKRSLNGLASFGSADFLVYQVKIP

SEQ ID NO: 2411 - protein, 58 aa, synthetic construct
  REGION 1..58: note = ATaRI peptide
NEVDPYLLGKGVREYVFQLEEAKINFLRCHTGPYILEQGSVGSRLGVECGYLLIPLCG

SEQ ID NO: 2412 - protein, 40 aa, synthetic construct
  REGION 1..40: note = ATaRI peptide
QLIAHDKEVRCFSISSFLKCFLCLPHRKRSACSLIVLQFM

SEQ ID NO: 2413 - protein, 12 aa, synthetic construct
  REGION 1..12: note = ATaRI peptide
IETALKMEVCTV

SEQ ID NO: 2414 - protein, 40 aa, synthetic construct
  REGION 1..40: note = ATaRI peptide
DTGHSNRQVCVTLAELSEICWGGVFKWEIYEKPRRLHYQG

SEQ ID NO: 2415 - protein, 84 aa, synthetic construct
  REGION 1..84: note = ATaRI peptide
DLHYMNNEVRRQMDGAGTRGADAYLFSLCLPEPLKFVPLISSAGFHFLDPLFLIPTTVGSLFFTTWEITQPSQPSPFPLLIQCR

SEQ ID NO: 2416 - protein, 34 aa, synthetic construct
  REGION 1..34: note = ATaRI peptide
PRSRHLSVSEYFNPFFSPSILSAHILKKQQVFVN

SEQ ID NO: 2417 - protein, 12 aa, synthetic construct
  REGION 1..12: note = ATaRI peptide
QPTPIQCQVSKT

SEQ ID NO: 2418 - protein, 14 aa, synthetic construct
  REGION 1..14: note = ATaRI peptide
AEIVVCTPVSMPCV

SEQ ID NO: 2419 - protein, 36 aa, synthetic construct
  REGION 1..36: note = ATaRI peptide
SHVRPDRQSMYEAPLLNQICTKKGTYLFYKHSELWK

SEQ ID NO: 2420 - protein, 12 aa, synthetic construct
  REGION 1..12: note = ATaRI peptide
WVLPKYKTSKFF

SEQ ID NO: 2421 - protein, 29 aa, synthetic construct
  REGION 1..29: note = ATaRI peptide
SILGEKVPGKNTKSRSNFAYILGQKFLVL

SEQ ID NO: 2422 - protein, 11 aa, synthetic construct
  REGION 1..11: note = ATaRI peptide
SRTSFVEDSEL

SEQ ID NO: 2423 - protein, 31 aa, synthetic construct
  REGION 1..31: note = ATaRI peptide
YGPKKSRPGTYPRETEKGDIHVNYLGSSICS

SEQ ID NO: 2424 - protein, 20 aa, synthetic construct
  REGION 1..20: note = ATaRI peptide
CLTNTTHCRESKLHGDKLLH

SEQ ID NO: 2425 - protein, 9 aa, synthetic construct
  REGION 1..9: note = ATaRI peptide
FKLPALKYL

SEQ ID NO: 2426 - protein, 61 aa, synthetic construct
  REGION 1..61: note = ATaRI peptide
AATAPTSSGRCRAGHSCPAPPRLRVPAPGAPARPPRGWLTPITWNRRESELFARSDTRARP

SEQ ID NO: 2427 - protein, 10 aa, synthetic construct
  REGION 1..10: note = ATaRI peptide
IHQGMKCDSK

SEQ ID NO: 2428 - protein, 38 aa, synthetic construct
  REGION 1..38: note = ATaRI peptide
LGKGSFGKVRGQSSANCRGFCRECRISFVLLVVCRIAH

SEQ ID NO: 2429 - protein, 31 aa, synthetic construct
  REGION 1..31: note = ATaRI peptide
LHSCFQTVVRTLGIPAMQYPALRATPQPKAS

SEQ ID NO: 2430 - protein, 9 aa, synthetic construct
  REGION 1..9: note = ATaRI peptide
GKFKEPQAV

SEQ ID NO: 2431 - protein, 9 aa, synthetic construct
  REGION 1..9: note = ATaRI peptide
AAGQSSSIR

SEQ ID NO: 2432 - protein, 9 aa, synthetic construct
  REGION 1..9: note = ATaRI peptide
VISDEEVIK

SEQ ID NO: 2433 - protein, 19 aa, synthetic construct
  REGION 1..19: note = ATaRI peptide
VLIFITEKVSDIFNSWPIL

SEQ ID NO: 2434 - protein, 13 aa, synthetic construct
  REGION 1..13: note = ATaRI peptide
LPQGTSGQVSFFT

SEQ ID NO: 2435 - protein, 13 aa, synthetic construct
  REGION 1..13: note = ATaRI peptide
DPEQGKSEGKKIT

SEQ ID NO: 2436 - protein, 12 aa, synthetic construct
  REGION 1..12: note = ATaRI peptide
RPTFGITWRYVL

SEQ ID NO: 2437 - protein, 18 aa, synthetic construct
  REGION 1..18: note = ATaRI peptide
PGGGTTRTGKGEGSYFLI

SEQ ID NO: 2438 - protein, 9 aa, synthetic construct
  REGION 1..9: note = ATaRI peptide
WEIRAFAER

SEQ ID NO: 2439 - protein, 27 aa, synthetic construct
  REGION 1..27: note = ATaRI peptide
QSEIIQKQVKLLSKSSMFSSLNYCAVQ

SEQ ID NO: 2440 - protein, 30 aa, synthetic construct
  REGION 1..30: note = ATaRI peptide
VIDQGETDVRFTNIKNMLILKANVLIASEQ

SEQ ID NO: 2441 - protein, 17 aa, synthetic construct
  REGION 1..17: note = ATaRI peptide
GLLGPPLSGKWNGVPRG

SEQ ID NO: 2442 - protein, 36 aa, synthetic construct
  REGION 1..36: note = ATaRI peptide
TITGQHPAGELLAKLFKFWFTQLIICSASTVCQPPC

SEQ ID NO: 2443 - protein, 9 aa, synthetic construct
  REGION 1..9: note = ATaRI peptide
QPLRAHRGR

SEQ ID NO: 2444 - protein, 109 aa, synthetic construct
  REGION 1..109: note = ATaRI peptide
VRATTSRARWVGLFRETPALLGASPFLAASGLDSALPPGSCVSQRREGERVRTQPLGPSQALGVSAGLVGAGRGRSQKLSDPPAGPNSVLFCHTLANMSPREPMLLGEG

SEQ ID NO: 2445 - protein, 31 aa, synthetic construct
  REGION 1..31: note = ATaRI peptide
IPSQEHLNGKPGGATGRPGAGAPQVRDVSQG

SEQ ID NO: 2446 - protein, 32 aa, synthetic construct
  REGION 1..32: note = ATaRI peptide
MASMFFNKGRSSFGGGVWGNGELVLPCRPAPL

SEQ ID NO: 2447 - protein, 51 aa, synthetic construct
  REGION 1..51: note = ATaRI peptide
VDAYRIYLVSVCASVPPAPAQPAQLRAFEVPLLPGRILSPERRIYSSPHSG

SEQ ID NO: 2448 - protein, 88 aa, synthetic construct
  REGION 1..88: note = ATaRI peptide
LTSLMRWIGESEKQLESLRFLLSSLPSPFMRGRAGPPAVAGVWWWFPLTQACLVLPPFQRIRRGLNTQLAFYCWGNLTPKQDDCFEVT

SEQ ID NO: 2449 - protein, 9 aa, synthetic construct
  REGION 1..9: note = ATaRI peptide
VRPAGPGAG

SEQ ID NO: 2450 - protein, 9 aa, synthetic construct
  REGION 1..9: note = ATaRI peptide
ARTPPGGSR

SEQ ID NO: 2451 - protein, 18 aa, synthetic construct
  REGION 1..18: note = ATaRI peptide
ETLVEFAIGKGGARSLDA

SEQ ID NO: 2452 - protein, 37 aa, synthetic construct
  REGION 1..37: note = ATaRI peptide
CETSFNKKGRVFFLPNYPSWHIWLFFCLLPQILLVVD

SEQ ID NO: 2453 - protein, 9 aa, synthetic construct
  REGION 1..9: note = ATaRI peptide
LTGKSRKSQ

SEQ ID NO: 2454 - protein, 69 aa, synthetic construct
  REGION 1..69: note = ATaRI peptide
NGRQFSSQVRGVTFIVLAPLCPVSWAPTWGGFAVPVMAEVSSFQVDRQLLWVTVIVLPPSRCSSQGSAC

SEQ ID NO: 2455 - protein, 23 aa, synthetic construct
  REGION 1..23: note = ATaRI peptide
LSDRLTFLGESLGFVPCALGTSG

SEQ ID NO: 2456 - protein, 26 aa, synthetic construct
  REGION 1..26: note = ATaRI peptide
DLLYELLKVSLGCATPSACACPPVWA

SEQ ID NO: 2457 - protein, 38 aa, synthetic construct
  REGION 1..38: note = ATaRI peptide
EDENSRQSVGKSPRSRATESTISFVRFWNCANSVPFHG

SEQ ID NO: 2458 - protein, 80 aa, synthetic construct
  REGION 1..80: note = ATaRI peptide
KRDPQELVGEYWGILGARFSALLLAAWLPAMPGLPPHRASVCCEHCCPFGSLSGLWHFLGCPGETSREQFFFGNHICGVF

SEQ ID NO: 2459 - protein, 13 aa, synthetic construct
  REGION 1..13: note = ATaRI peptide
DINSPAAAGTHMR

SEQ ID NO: 2460 - protein, 9 aa, synthetic construct
  REGION 1..9: note = ATaRI peptide
TGLCPEGDE

SEQ ID NO: 2461 - protein, 20 aa, synthetic construct
  REGION 1..20: note = ATaRI peptide
LSEEPRWQGTGIHTSAAPSL

SEQ ID NO: 2462 - protein, 21 aa, synthetic construct
  REGION 1..21: note = ATaRI peptide
TEQQFHPEVGPTAGWGGGFGK

SEQ ID NO: 2463 - protein, 31 aa, synthetic construct
  REGION 1..31: note = ATaRI peptide
FCAFAHVERMLFPLPRGSALSHPSLAWLAQA

SEQ ID NO: 2464 - protein, 39 aa, synthetic construct
  REGION 1..39: note = ATaRI peptide
TSASHGSLGKRGSGSLRRTGAGTCAFRRCLWPPHLRHIS

SEQ ID NO: 2465 - protein, 13 aa, synthetic construct
  REGION 1..13: note = ATaRI peptide
DFHGSGYTRYCTV

SEQ ID NO: 2466 - protein, 9 aa, synthetic construct
  REGION 1..9: note = ATaRI peptide
DDQDMEVNE

SEQ ID NO: 2467 - protein, 17 aa, synthetic construct
  REGION 1..17: note = ATaRI peptide
FAIFKFVQVTSSDCDCV

SEQ ID NO: 2468 - protein, 51 aa, synthetic construct
  REGION 1..51: note = ATaRI peptide
EQVEYAEMVRTGANCLFINAAHLSPSWRWKKCSPSVSCSQTGLFFKTSFHM

SEQ ID NO: 2469 - protein, 25 aa, synthetic construct
  REGION 1..25: note = ATaRI peptide
QYTSNIKKVSVSWDFVAEGGQESLR

SEQ ID NO: 2470 - protein, 9 aa, synthetic construct
  REGION 1..9: note = ATaRI peptide
TKVFGRPIR

SEQ ID NO: 2471 - protein, 29 aa, synthetic construct
  REGION 1..29: note = ATaRI peptide
RCLVQVGKVFHVSLQVKKKKKKLILIIYS

SEQ ID NO: 2472 - protein, 37 aa, synthetic construct
  REGION 1..37: note = ATaRI peptide
APKKGLQKVSTTLLTTVHPENQRYFRHIQYPVNQTKR

SEQ ID NO: 2473 - protein, 23 aa, synthetic construct
  REGION 1..23: note = ATaRI peptide
QLTDMGFPVTGVVVYCYPPCFPK

SEQ ID NO: 2474 - protein, 30 aa, synthetic construct
  REGION 1..30: note = ATaRI peptide
NMNLDQAMSKSYNILFKKVPSCEVLLSRSI

SEQ ID NO: 2475 - protein, 50 aa, synthetic construct
  REGION 1..50: note = ATaRI peptide
NRYLLKSGGEGAALPASAWTVSLDPFGDVRGDRLGCEAGMIQGTVGGHLF

SEQ ID NO: 2476 - protein, 41 aa, synthetic construct
  REGION 1..41: note = ATaRI peptide
GWTSSYSSGKLHAPRVPMGALPFRGCAYHFVLYLLCKDPCL

SEQ ID NO: 2477 - protein, 49 aa, synthetic construct
  REGION 1..49: note = ATaRI peptide
HGVTPNLRGFHGSYSLAGQPSSPHEPWGLGQLLEILPAMSGLTAGLRAL

SEQ ID NO: 2478 - protein, 58 aa, synthetic construct
  REGION 1..58: note = ATaRI peptide
QKDNVLTQVGPHPWQPFHGRQHRSCRSPLDVQTRSSRPAWPTWRNSVSTKNTKQISQM

SEQ ID NO: 2479 - protein, 12 aa, synthetic construct
  REGION 1..12: note = ATaRI peptide
AEFFELMKVSGI

SEQ ID NO: 2480 - protein, 26 aa, synthetic construct
  REGION 1..26: note = ATaRI peptide
GLAGSLRLSEYGGQKVLGRATRVWGM

SEQ ID NO: 2481 - protein, 62 aa, synthetic construct
  REGION 1..62: note = ATaRI peptide
YKAFSQFMRCGKTGESSLIDTFNLREVLDPLESDESYETALQRIHGVYTPNSTRHFRELLDS

SEQ ID NO: 2482 - protein, 35 aa, synthetic construct
  REGION 1..35: note = ATaRI peptide
RRLRTMPRGEGPRGCNSRSSGSGQAEPGPWGPWGS

SEQ ID NO: 2483 - protein, 9 aa, synthetic construct
  REGION 1..9: note = ATaRI peptide
MMGGYLDDR

SEQ ID NO: 2484 - protein, 22 aa, synthetic construct
  REGION 1..22: note = ATaRI peptide
KPDLTSSTGNWGQKSLGFPFCA

SEQ ID NO: 2485 - protein, 57 aa, synthetic construct
  REGION 1..57: note = ATaRI peptide
AANEERKKCKATRQPHTPSGPGGFPRGVSMYHGQASRKVRCVCILEGFPPFLGGEGT

SEQ ID NO: 2486 - protein, 33 aa, synthetic construct
  REGION 1..33: note = ATaRI peptide
ILRKAVSEVKAVPAALSVRPSSECPRTGCWWVY

SEQ ID NO: 2487 - protein, 52 aa, synthetic construct
  REGION 1..52: note = ATaRI peptide
RLRTASTSRWAGQGRGRRPGQRVRVDIDTHAPHKGGVHVAPLCAGPLLGAEV

SEQ ID NO: 2488 - protein, 47 aa, synthetic construct
  REGION 1..47: note = ATaRI peptide
TGQPLIGKVGRGSRGRGLESRGLQPGGAGSCSGRRWDLRSHHAQWDS

SEQ ID NO: 2489 - protein, 103 aa, synthetic construct
  REGION 1..103: note = ATaRI peptide
PPFKTHCQVRLLPACRLQEALSCPRLRLFHLIIQQIFKCWGYSHDSDKALAFGVLTFQRRESQETDFSGEKSVEGGREGTQVGPEVPWHPQPEWPGEASLRRW

SEQ ID NO: 2490 - protein, 9 aa, synthetic construct
  REGION 1..9: note = ATaRI peptide
ADVQEVKAR

SEQ ID NO: 2491 - protein, 27 aa, synthetic construct
  REGION 1..27: note = ATaRI peptide
DLQYREKEVSGLPPAALPAGQEPHLTC

SEQ ID NO: 2492 - protein, 35 aa, synthetic construct
  REGION 1..35: note = ATaRI peptide
FHLDVTSSVSALQRQPMATSVKTWSPCLCVTPPRV

SEQ ID NO: 2493 - protein, 9 aa, synthetic construct
  REGION 1..9: note = ATaRI peptide
EYSFLKEVR

SEQ ID NO: 2494 - protein, 146 aa, synthetic construct
  REGION 1..146: note = ATaRI peptide
GNGVLHHRGNPALGGPGRALWGRAGGEGTSVVPHRKCWALGLCRQPPPMASFSAQRGRAVRSAPPPPPPVKDCLLSLHPLPLSCPPLPSLQCPVLAHLQVPLSSSDLITKRCPRARAQSGLPCQPPNLHGPSGPLSTTRQVYPGPH

SEQ ID NO: 2495 - protein, 43 aa, synthetic construct
  REGION 1..43: note = ATaRI peptide
RIPEPVRQVGVLGMRGGSTGSSASCHLLFRAPQQLSWGQSAVT

SEQ ID NO: 2496 - protein, 22 aa, synthetic construct
  REGION 1..22: note = ATaRI peptide
IAWNVLPRGEARAGPWGGRLWP

SEQ ID NO: 2497 - protein, 54 aa, synthetic construct
  REGION 1..54: note = ATaRI peptide
IEEGTAFRVSPSKGTLCIRGGSHFSGHLDCKAPRLGVVPRTLGCQILFTCLEKM

SEQ ID NO: 2498 - protein, 69 aa, synthetic construct
  REGION 1..69: note = ATaRI peptide
VLADPYMPVRTGQHALHGLGTQHSPLPTRCTAVGPFDGGYRRKVKGHSRGHVHGVSNCFTLDMALCLLP

SEQ ID NO: 2499 - protein, 130 aa, synthetic construct
  REGION 1..130: note = ATaRI peptide
DGSPMVRKVREPPARQQQGTQAGPRDTWGQARMALTTAGSTQFPLRVIARADLYMFHSLQVAFLYQTPMGLLHLKASSRLRLPAACVVVSFLPGSNTHRHHCDSKETQPPTDGGKVCVLGPPQHPMYVSD

SEQ ID NO: 2500 - protein, 20 aa, synthetic construct
  REGION 1..20: note = ATaRI peptide
AVADKDSIWYAPRWSGLPSG

SEQ ID NO: 2501 - protein, 69 aa, synthetic construct
  REGION 1..69: note = ATaRI peptide
TDREMKVQVTMQVSPKPWACGAVCAGLVLVTEPSKVCGEAWPSQGWSQGLGGQCRDNAGRRRGLPEASG

SEQ ID NO: 2502 - protein, 100 aa, synthetic construct
  REGION 1..100: note = ATaRI peptide
TEQDKAILVRARARGQGWGRDRRRGRGGRRGRKSPAPSAPRVRMGKLRRSAQPGPSVSPPCVPPRPRGLGPGSPARRRGCRLPRGPRVRLCEPRRGGRGW

SEQ ID NO: 2503 - protein, 80 aa, synthetic construct
  REGION 1..80: note = ATaRI peptide
ECLNKMHQVSLCRARGMEVWGAHWAGAGDRAGGLSHGVRVRHRARGWQGRCVGCCQAGRDAVTGCSTGWELWELGPQAPK

SEQ ID NO: 2504 - protein, 36 aa, synthetic construct
  REGION 1..36: note = ATaRI peptide
NSAAYHSKVRRLGAALCRRWALLAEMTQAPAPAPAP

SEQ ID NO: 2505 - protein, 55 aa, synthetic construct
  REGION 1..55: note = ATaRI peptide
SNKKRKKAGVCRPILGGSEALCVSTRPIAQILQNVSGRGNMPRPGAQKVGERGQS

SEQ ID NO: 2506 - protein, 9 aa, synthetic construct
  REGION 1..9: note = ATaRI peptide
FNPCEYDLK

SEQ ID NO: 2507 - protein, 9 aa, synthetic construct
  REGION 1..9: note = ATaRI peptide
LLSHFPQIR

SEQ ID NO: 2508 - protein, 9 aa, synthetic construct
  REGION 1..9: note = ATaRI peptide
GIILTGWQR

SEQ ID NO: 2509 - protein, 14 aa, synthetic construct
  REGION 1..14: note = ATaRI peptide
TLVPAGLMGLFRVL

SEQ ID NO: 2510 - protein, 9 aa, synthetic construct
  REGION 1..9: note = ATaRI peptide
TPLGPLSSR

SEQ ID NO: 2511 - protein, 98 aa, synthetic construct
  REGION 1..98: note = ATaRI peptide
RESEPQGGGQAAGRAGRGTGFFPERVAGLGAGRGLGFSRRRPWVALPGLPPPPLAGNPLRGASGERGRRKRPGRPEEFAPAGNCPEQEPRPPHTSCSP

SEQ ID NO: 2512 - protein, 181 aa, synthetic construct
  REGION 1..181: note = ATaRI peptide
HMDMRHLSRCIFTPPPTWLYYLSRCVFTPCFIMCVFTPPTGWLYYLSRCVFTPPPSWLHAPPRLALLSEHLSRCTLTPAPSWLSFPPSGSLMTEACTGDIILRSVMQRTRDSTYHEFCRMNGRHSLQPRAEARGISQSEMLTKGLAARRPRWLTPGIPTLREAEAGESLEVRSLRPAWPIW

SEQ ID NO: 2513 - protein, 50 aa, synthetic construct
  REGION 1..50: note = ATaRI peptide
PWTERAGRVRASAGGVGCRYPCGGHSMSLNSPSSDPPLPLSIMGYFQTSP

SEQ ID NO: 2514 - protein, 14 aa, synthetic construct
  REGION 1..14: note = ATaRI peptide
PHLLDPHLGKNRSC

SEQ ID NO: 2515 - protein, 13 aa, synthetic construct
  REGION 1..13: note = ATaRI peptide
KREDCLPYGKVYF

SEQ ID NO: 2516 - protein, 9 aa, synthetic construct
  REGION 1..9: note = ATaRI peptide
VVRWSAAKG

SEQ ID NO: 2517 - protein, 53 aa, synthetic construct
  REGION 1..53: note = ATaRI peptide
VGSVLDCFRYVRRAGEACGPDPELRSPGFPYILSRLLFIELFVRTPEALFSPF

SEQ ID NO: 2518 - protein, 49 aa, synthetic construct
  REGION 1..49: note = ATaRI peptide
VAWGSGRWRSVAVTLLRPEDRLRCMFSGKVSYHVPKWKCLSCLKKMKYL

SEQ ID NO: 2519 - protein, 9 aa, synthetic construct
  REGION 1..9: note = ATaRI peptide
RSNCFLVIR

SEQ ID NO: 2520 - protein, 9 aa, synthetic construct
  REGION 1..9: note = ATaRI peptide
NDDLERAKR

SEQ ID NO: 2521 - protein, 20 aa, synthetic construct
  REGION 1..20: note = ATaRI peptide
QRLKDEARGKIYNLKNTVDP

SEQ ID NO: 2522 - protein, 9 aa, synthetic construct
  REGION 1..9: note = ATaRI peptide
GHTSFFDKG

SEQ ID NO: 2523 - protein, 39 aa, synthetic construct
  REGION 1..39: note = ATaRI peptide
SKDDVGKNVSRLVGSTLPHGRVSQGPGPSHRSGRLLRGA

SEQ ID NO: 2524 - protein, 24 aa, synthetic construct
  REGION 1..24: note = ATaRI peptide
AEKASKLQVSQKPPLYTRPTVACP

SEQ ID NO: 2525 - protein, 40 aa, synthetic construct
  REGION 1..40: note = ATaRI peptide
EQLEQAKRVREALPCAVAWRKSVVRATPILSARSVQSCID

SEQ ID NO: 2526 - protein, 9 aa, synthetic construct
  REGION 1..9: note = ATaRI peptide
TTAAQQELR

SEQ ID NO: 2527 - protein, 9 aa, synthetic construct
  REGION 1..9: note = ATaRI peptide
VCRGYLARK

SEQ ID NO: 2528 - protein, 27 aa, synthetic construct
  REGION 1..27: note = ATaRI peptide
SRGPVSEKVGHSQNNTMYWVFFFSFKY

SEQ ID NO: 2529 - protein, 9 aa, synthetic construct
  REGION 1..9: note = ATaRI peptide
EGGVPADEV

SEQ ID NO: 2530 - protein, 20 aa, synthetic construct
  REGION 1..20: note = ATaRI peptide
SPSQGTLSGITGALHNFIWL

SEQ ID NO: 2531 - protein, 33 aa, synthetic construct
  REGION 1..33: note = ATaRI peptide
VGSGQQASRYVSLYSFFMWCLGFVDLYLGACLE

SEQ ID NO: 2532 - protein, 9 aa, synthetic construct
  REGION 1..9: note = ATaRI peptide
PLCHWAVDR

SEQ ID NO: 2533 - protein, 63 aa, synthetic construct
  REGION 1..63: note = ATaRI peptide
NLQGGHYTGEPCLAFLQMQLWPQPRDVPGMGVAQMLSSLGHLLRSDPSPTAHQEDEDEENKDE

SEQ ID NO: 2534 - protein, 30 aa, synthetic construct
  REGION 1..30: note = ATaRI peptide
NSLCNQEKGMLVKCAWLIFIFCNVCCYCSV

SEQ ID NO: 2535 - protein, 9 aa, synthetic construct
  REGION 1..9: note = ATaRI peptide
TGGAIGFRG

SEQ ID NO: 2536 - protein, 25 aa, synthetic construct
  REGION 1..25: note = ATaRI peptide
AASEYGKAGIFDYSPVAPVCNLKIV

SEQ ID NO: 2537 - protein, 21 aa, synthetic construct
  REGION 1..21: note = ATaRI peptide
ENYPTCYKVFFESVCFWYYIR

SEQ ID NO: 2538 - protein, 10 aa, synthetic construct
  REGION 1..10: note = ATaRI peptide
NVYYNESSCE

SEQ ID NO: 2539 - protein, 58 aa, synthetic construct
  REGION 1..58: note = ATaRI peptide
PSQVAGTTGVYHQQAFFFFFEMESHPVAQAGVQWRDLGSLQPPPPGFKPFSCLSLLSS

SEQ ID NO: 2540 - protein, 24 aa, synthetic construct
  REGION 1..24: note = ATaRI peptide
QRNDLQLRRYVSASGKLFLVWFIL

SEQ ID NO: 2541 - protein, 9 aa, synthetic construct
  REGION 1..9: note = ATaRI peptide
SCISWNPSR

SEQ ID NO: 2542 - protein, 9 aa, synthetic construct
  REGION 1..9: note = ATaRI peptide
RIFTLKPVR

SEQ ID NO: 2543 - protein, 9 aa, synthetic construct
  REGION 1..9: note = ATaRI peptide
LGHWIYLEV

SEQ ID NO: 2544 - protein, 24 aa, synthetic construct
  REGION 1..24: note = ATaRI peptide
WMNNKEPKVTFYIFGIIFWSTIGQ

SEQ ID NO: 2545 - protein, 12 aa, synthetic construct
  REGION 1..12: note = ATaRI peptide
PTSLEDSSGTAE

SEQ ID NO: 2546 - protein, 19 aa, synthetic construct
  REGION 1..19: note = ATaRI peptide
LPTNGLRQVCSSLYDFSEI

SEQ ID NO: 2547 - protein, 25 aa, synthetic construct
  REGION 1..25: note = ATaRI peptide
NKEHQFIQVCNYLFYPKFKIFPVLV

SEQ ID NO: 2548 - protein, 37 aa, synthetic construct
  REGION 1..37: note = ATaRI peptide
GGGNNVKRVSMESVGSAHSHQILDFEYYDGTVTLKWR

SEQ ID NO: 2549 - protein, 27 aa, synthetic construct
  REGION 1..27: note = ATaRI peptide
HLNHDLYSGNGFNEGAFRNLFFLKCVT

SEQ ID NO: 2550 - protein, 47 aa, synthetic construct
  REGION 1..47: note = ATaRI peptide
DDALEDRKVGSHLDYLLLRLSTLKSVNRCLIQTTVQAYITSVLLFYL

SEQ ID NO: 2551 - protein, 29 aa, synthetic construct
  REGION 1..29: note = ATaRI peptide
DSGVTSGLGKMLFLYYYYLLLFSQMTPQS

SEQ ID NO: 2552 - protein, 9 aa, synthetic construct
  REGION 1..9: note = ATaRI peptide
KDPEACEER

SEQ ID NO: 2553 - protein, 9 aa, synthetic construct
  REGION 1..9: note = ATaRI peptide
GGVPLGRTQ

SEQ ID NO: 2554 - protein, 15 aa, synthetic construct
  REGION 1..15: note = ATaRI peptide
QDELLVTEGKNSGVS

SEQ ID NO: 2555 - protein, 9 aa, synthetic construct
  REGION 1..9: note = ATaRI peptide
SKASLESTR

SEQ ID NO: 2556 - protein, 9 aa, synthetic construct
  REGION 1..9: note = ATaRI peptide
PQHGCVAPE

SEQ ID NO: 2557 - protein, 25 aa, synthetic construct
  REGION 1..25: note = ATaRI peptide
NNSFITHSVSWKYYYGFWKNTCIQL

SEQ ID NO: 2558 - protein, 28 aa, synthetic construct
  REGION 1..28: note = ATaRI peptide
NWMKSVLIGMIQHQATESLIPIHLIIKP

SEQ ID NO: 2559 - protein, 9 aa, synthetic construct
  REGION 1..9: note = ATaRI peptide
TTPNSFELM

SEQ ID NO: 2560 - protein, 13 aa, synthetic construct
  REGION 1..13: note = ATaRI peptide
NSQVRLPLVSFNL

SEQ ID NO: 2561 - protein, 22 aa, synthetic construct
  REGION 1..22: note = ATaRI peptide
EQGQYLQQVIRARYFSFCKCKT

SEQ ID NO: 2562 - protein, 32 aa, synthetic construct
  REGION 1..32: note = ATaRI peptide
FFGVEFETTYPYEPRYRLYSYLIRIGINSIIG

SEQ ID NO: 2563 - protein, 19 aa, synthetic construct
  REGION 1..19: note = ATaRI peptide
YLFTGLKLVRTISVHPCCL

SEQ ID NO: 2564 - protein, 16 aa, synthetic construct
  REGION 1..16: note = ATaRI peptide
SVNAKVLKVSNELYFV

SEQ ID NO: 2565 - protein, 14 aa, synthetic construct
  REGION 1..14: note = ATaRI peptide
VKSKKREAGKFEGL

SEQ ID NO: 2566 - protein, 9 aa, synthetic construct
  REGION 1..9: note = ATaRI peptide
RITTPGSER

SEQ ID NO: 2567 - protein, 16 aa, synthetic construct
  REGION 1..16: note = ATaRI peptide
SAISNASGGMFYIVFL

SEQ ID NO: 2568 - protein, 12 aa, synthetic construct
  REGION 1..12: note = ATaRI peptide
EQVQSRTKVRYI

SEQ ID NO: 2569 - protein, 27 aa, synthetic construct
  REGION 1..27: note = ATaRI peptide
LEHSVCANGKSWSCILVLWFCKPVFIY

SEQ ID NO: 2570 - protein, 19 aa, synthetic construct
  REGION 1..19: note = ATaRI peptide
DQSQSPMASKQDTEITLQV

SEQ ID NO: 2571 - protein, 16 aa, synthetic construct
  REGION 1..16: note = ATaRI peptide
GLGVQEESVSNCLVWQ

SEQ ID NO: 2572 - protein, 9 aa, synthetic construct
  REGION 1..9: note = ATaRI peptide
TRNTEDSLR

SEQ ID NO: 2573 - protein, 24 aa, synthetic construct
  REGION 1..24: note = ATaRI peptide
IKSLQNNQGVYTINRISTFLMTSD

SEQ ID NO: 2574 - protein, 23 aa, synthetic construct
  REGION 1..23: note = ATaRI peptide
EQKGEKSSSKICFCFVIFFNNVV

SEQ ID NO: 2575 - protein, 38 aa, synthetic construct
  REGION 1..38: note = ATaRI peptide
KNTARMENVSYRKYLSLNLEFCLNTFQKQDSKYNTLDF

SEQ ID NO: 2576 - protein, 37 aa, synthetic construct
  REGION 1..37: note = ATaRI peptide
EKKEHSTAVRIYRFFFFFFTRKIHIRKLWVKKKKLHV

SEQ ID NO: 2577 - protein, 127 aa, synthetic construct
  REGION 1..127: note = ATaRI peptide
FFDEANKQVRRARASSPARPCRGRGRAKAGPARPGPSVPSCPVPSRPSAGGGARSFLVGWAQPRPGVLAGDLGAGPPSQLRGCSGPVASVSIVGAPVLSRLLLLCLSLVTLVVKGLDVEIFIFLEIL

SEQ ID NO: 2578 - protein, 29 aa, synthetic construct
  REGION 1..29: note = ATaRI peptide
NLTLDLGQVSYTFNWNGNMSLDHCFYGDF

SEQ ID NO: 2579 - protein, 28 aa, synthetic construct
  REGION 1..28: note = ATaRI peptide
RDPTVTRRVSSQSICFVTLFIHFFGLPN

SEQ ID NO: 2580 - protein, 9 aa, synthetic construct
  REGION 1..9: note = ATaRI peptide
CNINNPEKL

SEQ ID NO: 2581 - protein, 28 aa, synthetic construct
  REGION 1..28: note = ATaRI peptide
WEQSHECEGGCGDGVGATRGLLPPLPGG

SEQ ID NO: 2582 - protein, 45 aa, synthetic construct
  REGION 1..45: note = ATaRI peptide
GGVCINCQVRHYLNQSGCVVMGNEYSVSSAPEEMSRKWQAIVRVF

SEQ ID NO: 2583 - protein, 72 aa, synthetic construct
  REGION 1..72: note = ATaRI peptide
VDAPDGCIRKFHFKLVYLSLCVLPQRSHQANFGSVNNFLHALSLQSISCARYVTSVTYTVSLNFGFIACKWK

SEQ ID NO: 2584 - protein, 31 aa, synthetic construct
  REGION 1..31: note = ATaRI peptide
YYNFPFCLSKYPLQNKRPPFLVHSWLLCTNL

SEQ ID NO: 2585 - protein, 10 aa, synthetic construct
  REGION 1..10: note = ATaRI peptide
DPVAGDIKGK

SEQ ID NO: 2586 - protein, 23 aa, synthetic construct
  REGION 1..23: note = ATaRI peptide
FYSFPICQGKWAEHSIFIINPSR

SEQ ID NO: 2587 - protein, 110 aa, synthetic construct
  REGION 1..110: note = ATaRI peptide
AYDFPHCQGRKVSRLLEGWFLSEVCAASLPEKPANPPQTHHWPPPHPAFTDLVCLVPHLFKSGLKTRISYMYPQRNPEMIFLTKNNVNFHVLYMWVSWFTCQFSVDSIVA

SEQ ID NO: 2588 - protein, 33 aa, synthetic construct
  REGION 1..33: note = ATaRI peptide
YAQMTSVQVRNPKRAASWLSSSDTSPHQSQGAP

SEQ ID NO: 2589 - protein, 13 aa, synthetic construct
  REGION 1..13: note = ATaRI peptide
HITIYPSWGKARR

SEQ ID NO: 2590 - protein, 46 aa, synthetic construct
  REGION 1..46: note = ATaRI peptide
IKAEGVLLVRLSSEWRAPAGFFLPQKWFHPRLQSTATIKYHNHWWF

SEQ ID NO: 2591 - protein, 23 aa, synthetic construct
  REGION 1..23: note = ATaRI peptide
AYAGPPQEKSVWGRRCSRIIGVL

SEQ ID NO: 2592 - protein, 13 aa, synthetic construct
  REGION 1..13: note = ATaRI peptide
GVTLKAPQVVCCF

SEQ ID NO: 2593 - protein, 9 aa, synthetic construct
  REGION 1..9: note = ATaRI peptide
CGKNSFYLE

SEQ ID NO: 2594 - protein, 38 aa, synthetic construct
  REGION 1..38: note = ATaRI peptide
HYGFPRCKRKCTFPITQVLLWSRVDDAYQEQASSVALC

SEQ ID NO: 2595 - protein, 9 aa, synthetic construct
  REGION 1..9: note = ATaRI peptide
CDRDSGQCR

SEQ ID NO: 2596 - protein, 24 aa, synthetic construct
  REGION 1..24: note = ATaRI peptide
SSHKRRTKVCIDRKCWGTFCTWIC

SEQ ID NO: 2597 - protein, 50 aa, synthetic construct
  REGION 1..50: note = ATaRI peptide
PTSYLGDKVMMSCCSSGPSVGLCYCCMSIISWKSGRKHPAVQVTNVPEMS

SEQ ID NO: 2598 - protein, 13 aa, synthetic construct
  REGION 1..13: note = ATaRI peptide
KKPDVQLTVGIRA

SEQ ID NO: 2599 - protein, 14 aa, synthetic construct
  REGION 1..14: note = ATaRI peptide
HGRVHVVEVKEEQP

SEQ ID NO: 2600 - protein, 15 aa, synthetic construct
  REGION 1..15: note = ATaRI peptide
ACPCPHTNRYRSSLT

SEQ ID NO: 2601 - protein, 9 aa, synthetic construct
  REGION 1..9: note = ATaRI peptide
GYTGTQCER

SEQ ID NO: 2602 - protein, 19 aa, synthetic construct
  REGION 1..19: note = ATaRI peptide
ERALGAIQVSSQFEVAHFR

SEQ ID NO: 2603 - protein, 22 aa, synthetic construct
  REGION 1..22: note = ATaRI peptide
QARDAASKVSVSPRGQWPRLVL

SEQ ID NO: 2604 - protein, 39 aa, synthetic construct
  REGION 1..39: note = ATaRI peptide
VMYLGNKDVSIAWTSLLFLKQCFSRGVLLRCVARLHHCH

SEQ ID NO: 2605 - protein, 13 aa, synthetic construct
  REGION 1..13: note = ATaRI peptide
TKTFRINQVSVQT

SEQ ID NO: 2606 - protein, 22 aa, synthetic construct
  REGION 1..22: note = ATaRI peptide
LPQELLKPRYYLAFLPQHQLRT

SEQ ID NO: 2607 - protein, 74 aa, synthetic construct
  REGION 1..74: note = ATaRI peptide
CNDGKWHTVRAGAVSVSPVGVEFTVGVAENRSPSILPRHEGVEWESLCACRRCVPSISVLEAAAHTLHGCHPRQ

SEQ ID NO: 2608 - protein, 9 aa, synthetic construct
  REGION 1..9: note = ATaRI peptide
APSKILLCG

SEQ ID NO: 2609 - protein, 43 aa, synthetic construct
  REGION 1..43: note = ATaRI peptide
IKNKIKKNVSIAALGCGLCATYLEYHFCSFRTKAICLVLVFRI

SEQ ID NO: 2610 - protein, 17 aa, synthetic construct
  REGION 1..17: note = ATaRI peptide
FDISETRTGIMLLTNFF

SEQ ID NO: 2611 - protein, 20 aa, synthetic construct
  REGION 1..20: note = ATaRI peptide
APVVCPKQVKFLCLAHFDDY

SEQ ID NO: 2612 - protein, 9 aa, synthetic construct
  REGION 1..9: note = ATaRI peptide
ATHNIYAYR

SEQ ID NO: 2613 - protein, 16 aa, synthetic construct
  REGION 1..16: note = ATaRI peptide
EKNYTNSPVSGSSYYI

SEQ ID NO: 2614 - protein, 14 aa, synthetic construct
  REGION 1..14: note = ATaRI peptide
PHLVPFLKVELCVT

SEQ ID NO: 2615 - protein, 9 aa, synthetic construct
  REGION 1..9: note = ATaRI peptide
KENVTSCFR

SEQ ID NO: 2616 - protein, 16 aa, synthetic construct
  REGION 1..16: note = ATaRI peptide
QHRMTTYKVKEIIKEV

SEQ ID NO: 2617 - protein, 32 aa, synthetic construct
  REGION 1..32: note = ATaRI peptide
AEGFAGAPGEARGCAGRSAGLSRNFRLSLGVC

SEQ ID NO: 2618 - protein, 9 aa, synthetic construct
  REGION 1..9: note = ATaRI peptide
NFLLAAFDP

SEQ ID NO: 2619 - protein, 22 aa, synthetic construct
  REGION 1..22: note = ATaRI peptide
GKIMDKLRCKLLFLVCLFAFPC

SEQ ID NO: 2620 - protein, 9 aa, synthetic construct
  REGION 1..9: note = ATaRI peptide
SGSPFITRR

SEQ ID NO: 2621 - protein, 14 aa, synthetic construct
  REGION 1..14: note = ATaRI peptide
VNQLDHGARSVSQP

SEQ ID NO: 2622 - protein, 19 aa, synthetic construct
  REGION 1..19: note = ATaRI peptide
NMLRNNPSWLVQVWLLDCP

SEQ ID NO: 2623 - protein, 9 aa, synthetic construct
  REGION 1..9: note = ATaRI peptide
IAELENKNR

SEQ ID NO: 2624 - protein, 53 aa, synthetic construct
  REGION 1..53: note = ATaRI peptide
FKRMNVDKVGDLYLHKMCCFFLKLFLCINAKVQEHTNGIYLDIPTVGWGLYLA

SEQ ID NO: 2625 - protein, 9 aa, synthetic construct
  REGION 1..9: note = ATaRI peptide
LLARIKHDR

SEQ ID NO: 2626 - protein, 16 aa, synthetic construct
  REGION 1..16: note = ATaRI peptide
FKDSKSVLVRFQFQYV

SEQ ID NO: 2627 - protein, 10 aa, synthetic construct
  REGION 1..10: note = ATaRI peptide
NTFTIENESE

SEQ ID NO: 2628 - protein, 34 aa, synthetic construct
  REGION 1..34: note = ATaRI peptide
LSNKAVFQGKAFVFKIIKPIVVLKPQSYTCVMST

SEQ ID NO: 2629 - protein, 9 aa, synthetic construct
  REGION 1..9: note = ATaRI peptide
TLWPEVQKL

SEQ ID NO: 2630 - protein, 9 aa, synthetic construct
  REGION 1..9: note = ATaRI peptide
LEGFQDDAG

SEQ ID NO: 2631 - protein, 42 aa, synthetic construct
  REGION 1..42: note = ATaRI peptide
FSLKQIFQVNRKKISTYLFLHCCEIRYRQASTCTCYEKEGQI

SEQ ID NO: 2632 - protein, 10 aa, synthetic construct
  REGION 1..10: note = ATaRI peptide
VTAVDTKRGE

SEQ ID NO: 2633 - protein, 10 aa, synthetic construct
  REGION 1..10: note = ATaRI peptide
YAMTLVNKVG

SEQ ID NO: 2634 - protein, 32 aa, synthetic construct
  REGION 1..32: note = ATaRI peptide
VEQLNIYEVPDHAFCKVSYSFGNCQRLRWRLL

SEQ ID NO: 2635 - protein, 41 aa, synthetic construct
  REGION 1..41: note = ATaRI peptide
DASCQGKDRYLGLEPPKLTLKVGDSFLMIVHCLLVATSLPH

SEQ ID NO: 2636 - protein, 30 aa, synthetic construct
  REGION 1..30: note = ATaRI peptide
SKELSVSKVLLVFSMLLDWKLGRAEEIRSV

SEQ ID NO: 2637 - protein, 47 aa, synthetic construct
  REGION 1..47: note = ATaRI peptide
ALNKEGIEVREALLSIICILSYTACIICCMSTFQKIHGAFLSQLDSE

SEQ ID NO: 2638 - protein, 12 aa, synthetic construct
  REGION 1..12: note = ATaRI peptide
MDYETTEKVSSL

SEQ ID NO: 2639 - protein, 37 aa, synthetic construct
  REGION 1..37: note = ATaRI peptide
GAITRSAKVCLWTLRSGPGLAAATGSLSVILEEHEPY

SEQ ID NO: 2640 - protein, 9 aa, synthetic construct
  REGION 1..9: note = ATaRI peptide
IVHRRIINR

SEQ ID NO: 2641 - protein, 23 aa, synthetic construct
  REGION 1..23: note = ATaRI peptide
TRGKMITDVSFTQSLSLCHSFSK

SEQ ID NO: 2642 - protein, 39 aa, synthetic construct
  REGION 1..39: note = ATaRI peptide
RTRSRASRGNSWLRGARLVFSGWPLWGGPVSIAGCGPRL

SEQ ID NO: 2643 - protein, 9 aa, synthetic construct
  REGION 1..9: note = ATaRI peptide
HQSRLDYNW

SEQ ID NO: 2644 - protein, 21 aa, synthetic construct
  REGION 1..21: note = ATaRI peptide
KDTCRPQRGKFNNCSGKMRNW

SEQ ID NO: 2645 - protein, 9 aa, synthetic construct
  REGION 1..9: note = ATaRI peptide
PSLQHTTSR

SEQ ID NO: 2646 - protein, 22 aa, synthetic construct
  REGION 1..22: note = ATaRI peptide
LYHQGVRNVSKASLDVPALTTQ

SEQ ID NO: 2647 - protein, 16 aa, synthetic construct
  REGION 1..16: note = ATaRI peptide
REIEMINEVGYITLLF

SEQ ID NO: 2648 - protein, 21 aa, synthetic construct
  REGION 1..21: note = ATaRI peptide
RLRQADDEVHYYLLFCFNGSF

SEQ ID NO: 2649 - protein, 21 aa, synthetic construct
  REGION 1..21: note = ATaRI peptide
GINSAEIDRYGYPGRTYFLVC

SEQ ID NO: 2650 - protein, 34 aa, synthetic construct
  REGION 1..34: note = ATaRI peptide
RFSQALLKVTLKCEGWQTAAHGPNSACCLFRNIP

SEQ ID NO: 2651 - protein, 48 aa, synthetic construct
  REGION 1..48: note = ATaRI peptide
ESGNRKKKVSLWCMLLFLIASWHQKILNFHYCLFGLIREFFFFFFFFF

SEQ ID NO: 2652 - protein, 27 aa, synthetic construct
  REGION 1..27: note = ATaRI peptide
QIISLMDKVNMTLCWWGTFFSFWNTVA

SEQ ID NO: 2653 - protein, 19 aa, synthetic construct
  REGION 1..19: note = ATaRI peptide
VLATSTKHGKCILHHYYLL

SEQ ID NO: 2654 - protein, 12 aa, synthetic construct
  REGION 1..12: note = ATaRI peptide
EPDKTVKKVIFK

SEQ ID NO: 2655 - protein, 75 aa, synthetic construct
  REGION 1..75: note = ATaRI peptide
EQIHKFAQVSSLSAVHFSHLLRVLPQSPWRAMHFSCQLTSFLFFYQVVLTSHQPAEVNCVSHVTNSKTSAFLSND

SEQ ID NO: 2656 - protein, 12 aa, synthetic construct
  REGION 1..12: note = ATaRI peptide
QSLVALSEVSLF

SEQ ID NO: 2657 - protein, 45 aa, synthetic construct
  REGION 1..45: note = ATaRI peptide
AVLCCSMEVSFGASTSPTSKPVHLSCLNSSRGTRVVGGIYKSRGR

SEQ ID NO: 2658 - protein, 70 aa, synthetic construct
  REGION 1..70: note = ATaRI peptide
DKYGLLVKVRYLKFGEAKECIIFLVGFLKYYSLKSCFSLESPNYTNWDLPLSFQQMSLVLLSFTKTSASY

SEQ ID NO: 2659 - protein, 15 aa, synthetic construct
  REGION 1..15: note = ATaRI peptide
MPPHPGHYCKLLFLL

SEQ ID NO: 2660 - protein, 18 aa, synthetic construct
  REGION 1..18: note = ATaRI peptide
SGHVYNNQCEWVLIHSTY

SEQ ID NO: 2661 - protein, 25 aa, synthetic construct
  REGION 1..25: note = ATaRI peptide
LNHIKEIPGKTNIFEKYIYVLFYFF

SEQ ID NO: 2662 - protein, 16 aa, synthetic construct
  REGION 1..16: note = ATaRI peptide
VILSGPPQVHDDTYFN

SEQ ID NO: 2663 - protein, 9 aa, synthetic construct
  REGION 1..9: note = ATaRI peptide
IPITRSLQK

SEQ ID NO: 2664 - protein, 9 aa, synthetic construct
  REGION 1..9: note = ATaRI peptide
YIVSASESG

SEQ ID NO: 2665 - protein, 22 aa, synthetic construct
  REGION 1..22: note = ATaRI peptide
IIRSHRTQGQCIMPVRSFSTMT

SEQ ID NO: 2666 - protein, 10 aa, synthetic construct
  REGION 1..10: note = ATaRI peptide
VVCSKYWRVR

SEQ ID NO: 2667 - protein, 16 aa, synthetic construct
  REGION 1..16: note = ATaRI peptide
LLDRKDKEVKFLRCHL

SEQ ID NO: 2668 - protein, 14 aa, synthetic construct
  REGION 1..14: note = ATaRI peptide
HTCFLVNEGISLNF

SEQ ID NO: 2669 - protein, 12 aa, synthetic construct
  REGION 1..12: note = ATaRI peptide
RWQDRCLEVMLK

SEQ ID NO: 2670 - protein, 28 aa, synthetic construct
  REGION 1..28: note = ATaRI peptide
SEGGDVPEVRCPQNGAKPGSSFFPCSPA

SEQ ID NO: 2671 - protein, 42 aa, synthetic construct
  REGION 1..42: note = ATaRI peptide
VTLSAPLEVRRLPHLTGLTLSCDSHSFFSLNSAFSFAATSSL

SEQ ID NO: 2672 - protein, 18 aa, synthetic construct
  REGION 1..18: note = ATaRI peptide
PNDLGPLPVSTLETHGMV

SEQ ID NO: 2673 - protein, 9 aa, synthetic construct
  REGION 1..9: note = ATaRI peptide
EWTRMNTRK

SEQ ID NO: 2674 - protein, 30 aa, synthetic construct
  REGION 1..30: note = ATaRI peptide
FRKKLKKPVSNHAFQKCFVLVICKLPQSLQ

SEQ ID NO: 2675 - protein, 103 aa, synthetic construct
  REGION 1..103: note = ATaRI peptide
KQMNAFLEVSHAGQGSLPCASGPGSMGDRASPLASVVELIRDRGEAGDPAGRPGSHSSHRWPVSSTRVFSHRAATSFSFSRVLLLDFSYFYICPVFKEDVLQT

SEQ ID NO: 2676 - protein, 9 aa, synthetic construct
  REGION 1..9: note = ATaRI peptide
EKLPRAHTW

SEQ ID NO: 2677 - protein, 23 aa, synthetic construct
  REGION 1..23: note = ATaRI peptide
TVHFDKPNRLVCILYFEMHLSAI

SEQ ID NO: 2678 - protein, 28 aa, synthetic construct
  REGION 1..28: note = ATaRI peptide
GALAPYLPVRLSFFFSLNYFSNNRKTFF

SEQ ID NO: 2679 - protein, 25 aa, synthetic construct
  REGION 1..25: note = ATaRI peptide
NKIEKLLRVSSSFVYIVCRNLKGLS

SEQ ID NO: 2680 - protein, 21 aa, synthetic construct
  REGION 1..21: note = ATaRI peptide
HGEVPQIEGTELKFWKKNVEY

SEQ ID NO: 2681 - protein, 18 aa, synthetic construct
  REGION 1..18: note = ATaRI peptide
GKIFTNTKVKTCIPCFLI

SEQ ID NO: 2682 - protein, 9 aa, synthetic construct
  REGION 1..9: note = ATaRI peptide
LKASFVELG

SEQ ID NO: 2683 - protein, 30 aa, synthetic construct
  REGION 1..30: note = ATaRI peptide
AYSALSCCCILVLLRCIYIYVTNLRVELGW

SEQ ID NO: 2684 - protein, 9 aa, synthetic construct
  REGION 1..9: note = ATaRI peptide
HTGKSPIVK

SEQ ID NO: 2685 - protein, 19 aa, synthetic construct
  REGION 1..19: note = ATaRI peptide
HCVTSADQVCGEFVLELYS

SEQ ID NO: 2686 - protein, 42 aa, synthetic construct
  REGION 1..42: note = ATaRI peptide
ESEEEKDRGLLFEVGVLLAWQGWGSGGKCVLFLHVKVKQGIL

SEQ ID NO: 2687 - protein, 19 aa, synthetic construct
  REGION 1..19: note = ATaRI peptide
SSMEANQQGNHNNSQRTCF

SEQ ID NO: 2688 - protein, 9 aa, synthetic construct
  REGION 1..9: note = ATaRI peptide
PHIKHVDLR

SEQ ID NO: 2689 - protein, 9 aa, synthetic construct
  REGION 1..9: note = ATaRI peptide
NQICELPAR

SEQ ID NO: 2690 - protein, 9 aa, synthetic construct
  REGION 1..9: note = ATaRI peptide
NRLQSFPAR

SEQ ID NO: 2691 - protein, 14 aa, synthetic construct
  REGION 1..14: note = ATaRI peptide
VMQLPEIKVCGFIS

SEQ ID NO: 2692 - protein, 9 aa, synthetic construct
  REGION 1..9: note = ATaRI peptide
DHKTLELLK

SEQ ID NO: 2693 - protein, 9 aa, synthetic construct
  REGION 1..9: note = ATaRI peptide
TEASGVKNK

SEQ ID NO: 2694 - protein, 38 aa, synthetic construct
  REGION 1..38: note = ATaRI peptide
DWVAEKTEGETVSFLLIWNYYTTRLRLTGMGLPRVLPL

SEQ ID NO: 2695 - protein, 13 aa, synthetic construct
  REGION 1..13: note = ATaRI peptide
DDNTDLAVVSSRQ

SEQ ID NO: 2696 - protein, 21 aa, synthetic construct
  REGION 1..21: note = ATaRI peptide
VIKTSGSMVSYSCGGMVVGMK

SEQ ID NO: 2697 - protein, 29 aa, synthetic construct
  REGION 1..29: note = ATaRI peptide
AVPRSDSVVSHPCQHSYMSRYSCKSKQLM

SEQ ID NO: 2698 - protein, 17 aa, synthetic construct
  REGION 1..17: note = ATaRI peptide
SGCTAKVKVPNILSLPR

SEQ ID NO: 2699 - protein, 9 aa, synthetic construct
  REGION 1..9: note = ATaRI peptide
QKILWKERE

SEQ ID NO: 2700 - protein, 29 aa, synthetic construct
  REGION 1..29: note = ATaRI peptide
DANRDAAQVRRVHLTACPGALIAQRTWLI

SEQ ID NO: 2701 - protein, 114 aa, synthetic construct
  REGION 1..114: note = ATaRI peptide
RRKTLEREVRQQMRHGDCPLPRFVLLKGGHKVACHLEPSILYSQGSGSVVTINIMESGSITEYRGLCILLRVMCFLVKVLEISQSGRLFDIPPERLKWFSQKLKVNILVPVNLI

SEQ ID NO: 2702 - protein, 68 aa, synthetic construct
  REGION 1..68: note = ATaRI peptide
WHTFALTQVCSSAASQVSEDMGPFVPIQICSPTCGCSLAFHPVHISLPCAALLVCNKSLLTLNIFKGN

SEQ ID NO: 2703 - protein, 48 aa, synthetic construct
  REGION 1..48: note = ATaRI peptide
KDHYRTHTGVPRRLPIPGGWAEVDWVDCGNRGINYPIFIVINGNDVLL

SEQ ID NO: 2704 - protein, 31 aa, synthetic construct
  REGION 1..31: note = ATaRI peptide
TKHRRQHTGQFRCCTGPFSAERTARHPSLNS

SEQ ID NO: 2705 - protein, 9 aa, synthetic construct
  REGION 1..9: note = ATaRI peptide
YRCPWCDYR

SEQ ID NO: 2706 - protein, 21 aa, synthetic construct
  REGION 1..21: note = ATaRI peptide
HMKTHYKIRYESLHGLGQKSI

SEQ ID NO: 2707 - protein, 16 aa, synthetic construct
  REGION 1..16: note = ATaRI peptide
TRHIRIHTGMKTLTSG

SEQ ID NO: 2708 - protein, 17 aa, synthetic construct
  REGION 1..17: note = ATaRI peptide
EPILITDLGKMDCRASL

SEQ ID NO: 2709 - protein, 47 aa, synthetic construct
  REGION 1..47: note = ATaRI peptide
PSSDGMNVVSMDRGVHTWQYLAGAMLFFTVIIKNFLKGNFKRHAHFL

SEQ ID NO: 2710 - protein, 9 aa, synthetic construct
  REGION 1..9: note = ATaRI peptide
EDQSRRSYR

SEQ ID NO: 2711 - protein, 20 aa, synthetic construct
  REGION 1..20: note = ATaRI peptide
KSHEKTHTGHCLPYTWRLVL

SEQ ID NO: 2712 - protein, 22 aa, synthetic construct
  REGION 1..22: note = ATaRI peptide
ATGETEGGGIFHLLIQGVLTRC

SEQ ID NO: 2713 - protein, 9 aa, synthetic construct
  REGION 1..9: note = ATaRI peptide
FKKPSDLVR

SEQ ID NO: 2714 - protein, 22 aa, synthetic construct
  REGION 1..22: note = ATaRI peptide
DCHVKTHTGKENMPASLVEVLG

SEQ ID NO: 2715 - protein, 11 aa, synthetic construct
  REGION 1..11: note = ATaRI peptide
AILPASVSGKR

SEQ ID NO: 2716 - protein, 9 aa, synthetic construct
  REGION 1..9: note = ATaRI peptide
LYLENSSDK

SEQ ID NO: 2717 - protein, 48 aa, synthetic construct
  REGION 1..48: note = ATaRI peptide
ACEEIAYQVQDIPSFTELLSLLKTYRFRRDGGRGLWACCVTQVAGADF

SEQ ID NO: 2718 - protein, 25 aa, synthetic construct
  REGION 1..25: note = ATaRI peptide
HVRDSYSQVSGFLLHGVCFHTHPAP

SEQ ID NO: 2719 - protein, 23 aa, synthetic construct
  REGION 1..23: note = ATaRI peptide
PELMVSSEVSRASVAACWGSVVL

SEQ ID NO: 2720 - protein, 33 aa, synthetic construct
  REGION 1..33: note = ATaRI peptide
PFSKTGNLRYVPSRAPHKDLAVHFPFQKSHLEI

SEQ ID NO: 2721 - protein, 10 aa, synthetic construct
  REGION 1..10: note = ATaRI peptide
RESQTRKKGG

SEQ ID NO: 2722 - protein, 59 aa, synthetic construct
  REGION 1..59: note = ATaRI peptide
THLIAARAGECCLPVPWAWSGPRAPCRHSLELALLFISLSIFRNISQNHHLLRIDHDSG

SEQ ID NO: 2723 - protein, 26 aa, synthetic construct
  REGION 1..26: note = ATaRI peptide
IRTFAVEKVSFHTAFKSYGQTLVVPY

SEQ ID NO: 2724 - protein, 12 aa, synthetic construct
  REGION 1..12: note = ATaRI peptide
SQIKEEFRVSDA

SEQ ID NO: 2725 - protein, 65 aa, synthetic construct
  REGION 1..65: note = ATaRI peptide
YINAALMDVSAPLPARVRGWGVWGDCRTGLGLPHSAHQPFCFLRHKLFFPTKNRFQIPRMFLCRG

SEQ ID NO: 2726 - protein, 42 aa, synthetic construct
  REGION 1..42: note = ATaRI peptide
LVDDILKKVKKRIYIIKVYHLKPVVSFIAFLLRILYLETKIQ

SEQ ID NO: 2727 - protein, 42 aa, synthetic construct
  REGION 1..42: note = ATaRI peptide
KELGPDLQVRGLVASPPCSALLFLLLAGIAALGLTLLTAAWL

SEQ ID NO: 2728 - protein, 23 aa, synthetic construct
  REGION 1..23: note = ATaRI peptide
EEGEEFTEVTPLSNSFYLHLFCP

SEQ ID NO: 2729 - protein, 65 aa, synthetic construct
  REGION 1..65: note = ATaRI peptide
VLKCRLEQVPPSQVSLDPDCVSLLSRICGGGAGTERFRTMGFLSRKKREEWLLVSLLKVQSPHFP

SEQ ID NO: 2730 - protein, 22 aa, synthetic construct
  REGION 1..22: note = ATaRI peptide
EFLWRIEQVRRHPGALEHRHRV

SEQ ID NO: 2731 - protein, 24 aa, synthetic construct
  REGION 1..24: note = ATaRI peptide
TAEPGPMEVMNAECPTPFPTSSSL

SEQ ID NO: 2732 - protein, 12 aa, synthetic construct
  REGION 1..12: note = ATaRI peptide
RLQHSIERVRNV

SEQ ID NO: 2733 - protein, 15 aa, synthetic construct
  REGION 1..15: note = ATaRI peptide
KLREAKRQVSYYFDT

SEQ ID NO: 2734 - protein, 14 aa, synthetic construct
  REGION 1..14: note = ATaRI peptide
QRQNEELEVSFGGK

SEQ ID NO: 2735 - protein, 85 aa, synthetic construct
  REGION 1..85: note = ATaRI peptide
RHPPGRSVRWVARGQSVLSFNTEGHWLCWGGGGAESTWVSPLSGFQDLAGAPPPFLALKAWGAAEGFLKVAALKVGAGSIPAYPR

SEQ ID NO: 2736 - protein, 10 aa, synthetic construct
  REGION 1..10: note = ATaRI peptide
EYISTTFLGE

SEQ ID NO: 2737 - protein, 11 aa, synthetic construct
  REGION 1..11: note = ATaRI peptide
LLLHFLPRGEP

SEQ ID NO: 2738 - protein, 21 aa, synthetic construct
  REGION 1..21: note = ATaRI peptide
VYVSQDCTGKGLGAKITGAPP

SEQ ID NO: 2739 - protein, 41 aa, synthetic construct
  REGION 1..41: note = ATaRI peptide
EMEKVLAGGREAETRRQDFENVVFPHYSNVLFSFRLLWYTV

SEQ ID NO: 2740 - protein, 25 aa, synthetic construct
  REGION 1..25: note = ATaRI peptide
GSSYQGKQGGPGAPGGTAWGAWQLL

SEQ ID NO: 2741 - protein, 31 aa, synthetic construct
  REGION 1..31: note = ATaRI peptide
LIQFATPNGTWPSFHSGDTSPKRPEPWWAGA

SEQ ID NO: 2742 - protein, 38 aa, synthetic construct
  REGION 1..38: note = ATaRI peptide
NHTDFKDKVSGPRMCPPLCFCLGFFFLCSLILSLIFSD

SEQ ID NO: 2743 - protein, 23 aa, synthetic construct
  REGION 1..23: note = ATaRI peptide
GQHAPDAQGRDPCARLAPAASAH

SEQ ID NO: 2744 - protein, 44 aa, synthetic construct
  REGION 1..44: note = ATaRI peptide
RLLNFQRQVGAGMAAAFRKGPLSPTLLLRLQIRLAWLVLHLPGL

SEQ ID NO: 2745 - protein, 24 aa, synthetic construct
  REGION 1..24: note = ATaRI peptide
SGSEEEEEVRVHFLAFKALSAHWQ

SEQ ID NO: 2746 - protein, 36 aa, synthetic construct
  REGION 1..36: note = ATaRI peptide
GFKYLRLDGEYEPVRRFLQGFVVVAATEAPHWHSLL

SEQ ID NO: 2747 - protein, 9 aa, synthetic construct
  REGION 1..9: note = ATaRI peptide
FKIPRRNIR

SEQ ID NO: 2748 - protein, 28 aa, synthetic construct
  REGION 1..28: note = ATaRI peptide
DPDHPGQHGETPSLLKIQKLAGRGCGHL

SEQ ID NO: 2749 - protein, 9 aa, synthetic construct
  REGION 1..9: note = ATaRI peptide
DIWSAGVTL

SEQ ID NO: 2750 - protein, 9 aa, synthetic construct
  REGION 1..9: note = ATaRI peptide
SIRQIRQHR

SEQ ID NO: 2751 - protein, 30 aa, synthetic construct
  REGION 1..30: note = ATaRI peptide
QIRMCKPPGEWPPSGVLPSPPAWASQGPSV

SEQ ID NO: 2752 - protein, 23 aa, synthetic construct
  REGION 1..23: note = ATaRI peptide
PVLAGVRPGEKWGAPEGGSWGGG

SEQ ID NO: 2753 - protein, 11 aa, synthetic construct
  REGION 1..11: note = ATaRI peptide
PPRVLLYHGKK

SEQ ID NO: 2754 - protein, 21 aa, synthetic construct
  REGION 1..21: note = ATaRI peptide
KYPFWPAVVRTASSVFSDVVT

SEQ ID NO: 2755 - protein, 9 aa, synthetic construct
  REGION 1..9: note = ATaRI peptide
GHMNPKMKG

SEQ ID NO: 2756 - protein, 9 aa, synthetic construct
  REGION 1..9: note = ATaRI peptide
NYYTTPIYR

SEQ ID NO: 2757 - protein, 27 aa, synthetic construct
  REGION 1..27: note = ATaRI peptide
ATEEAVRERYGDLVPGTALSRNYIDSF

SEQ ID NO: 2758 - protein, 183 aa, synthetic construct
  REGION 1..183: note = ATaRI peptide
AVDRVLQVGESLSPTPAGEARRSIPGLEMGELEGGLGPGDGRLQTSGFEAQIGLYKIFFFFFFETESRSLAQAGVQWRDLGSLQAPPPGFTPFCLSLPSSWDYRRPPPRPANFLYFFFFFFFFFFFFFFETESRFFAQAGVQWRDLGSLQAPPPGFTPFSCLSLPSSRDYRRPPPSPANFLYF

SEQ ID NO: 2759 - protein, 37 aa, synthetic construct
  REGION 1..37: note = ATaRI peptide
CRQLWDELGEAQTPVRGGHRDFGSHGGWPTPRLGSVP

SEQ ID NO: 2760 - protein, 9 aa, synthetic construct
  REGION 1..9: note = ATaRI peptide
YRLALRAMR

SEQ ID NO: 2761 - protein, 9 aa, synthetic construct
  REGION 1..9: note = ATaRI peptide
EQRTFSVIK

SEQ ID NO: 2762 - protein, 37 aa, synthetic construct
  REGION 1..37: note = ATaRI peptide
NVHSKLKLVGRLQHQAGPSDGVVQQVTATSEPQVPWV

SEQ ID NO: 2763 - protein, 37 aa, synthetic construct
  REGION 1..37: note = ATaRI peptide
CAVSVHSAGRPCGLVATRQRVKRVLSLPHHTDKGPQA

SEQ ID NO: 2764 - protein, 76 aa, synthetic construct
  REGION 1..76: note = ATaRI peptide
EYFKKFGVVSFSPPRQHCGDRAASAQAWAFLGLEWPSHRCTGLSGWELAVSYFPNACALRKGGKPGLCLHGHFVSQ

SEQ ID NO: 2765 - protein, 16 aa, synthetic construct
  REGION 1..16: note = ATaRI peptide
PEDPKVCTGRGPRKTP

SEQ ID NO: 2766 - protein, 9 aa, synthetic construct
  REGION 1..9: note = ATaRI peptide
PQTLAPVSW

SEQ ID NO: 2767 - protein, 51 aa, synthetic construct
  REGION 1..51: note = ATaRI peptide
SRIEYMIKVRGPRPPTEGLLVSLARPRSLTEGWGCRRAAIRAPSLWPQMQE

SEQ ID NO: 2768 - protein, 39 aa, synthetic construct
  REGION 1..39: note = ATaRI peptide
VWSIKSFPVSTLSRHPRAPCACLCKAAWVPQDPLHLKMG

SEQ ID NO: 2769 - protein, 87 aa, synthetic construct
  REGION 1..87: note = ATaRI peptide
QEFSFFDKVRVGPGFHLGDAMSSWLGQCSLGLPQDWGGEQVGWVQSEDGSGGAGPQLSLRKGMWASLEPRHILWAGVPVGAETPSRV

SEQ ID NO: 2770 - protein, 35 aa, synthetic construct
  REGION 1..35: note = ATaRI peptide
GRTAICKEVALPGAQMFVDMVHPPPLPSKHPIPPL

SEQ ID NO: 2771 - protein, 9 aa, synthetic construct
  REGION 1..9: note = ATaRI peptide
LLKPVFLQR

SEQ ID NO: 2772 - protein, 27 aa, synthetic construct
  REGION 1..27: note = ATaRI peptide
AERAEKAAGGSWGVNPQKRHCREGGTS

SEQ ID NO: 2773 - protein, 123 aa, synthetic construct
  REGION 1..123: note = ATaRI peptide
LSLLRQNAVSTGDRGGGTSLVGRSLVLGRALGVALLLGRLVSGVLVGGALGGQDLPCRGWDRVVGVVSGSRAGPPFPVPRPLLPHPWPQPAWLGPPGPAGRGRLTALNERRWSSLSLTPIMFL

SEQ ID NO: 2774 - protein, 47 aa, synthetic construct
  REGION 1..47: note = ATaRI peptide
LHQQWDKKVRPTGLWCRDCGWTETGHLAGASEHRKDSSDWSRALRAG

SEQ ID NO: 2775 - protein, 9 aa, synthetic construct
  REGION 1..9: note = ATaRI peptide
ALNFPFARR

SEQ ID NO: 2776 - protein, 118 aa, synthetic construct
  REGION 1..118: note = ATaRI peptide
NTPSSTLSVPIAPPWQVDRQMPGCGGTHLCVFFSRCWIVVQSANILVTSSMHAPFWEMQGPLRRPSLGPKIVPGWGDTDILSLWGQGLTRGGLGAAQGYRQRGLPGGEGIRARVLRDA

SEQ ID NO: 2777 - protein, 33 aa, synthetic construct
  REGION 1..33: note = ATaRI peptide
GLAKDPLEGKPGWEEETKAGKGRMEARHGGSHL

SEQ ID NO: 2778 - protein, 9 aa, synthetic construct
  REGION 1..9: note = ATaRI peptide
VHRDLKPDK

SEQ ID NO: 2779 - protein, 10 aa, synthetic construct
  REGION 1..10: note = ATaRI peptide
SPLDRLGTGM

SEQ ID NO: 2780 - protein, 45 aa, synthetic construct
  REGION 1..45: note = ATaRI peptide
EDDTSYFDSKEGSPWRGGGGCSAIPQSLGAEGCVPGIPPELGTSP

SEQ ID NO: 2781 - protein, 23 aa, synthetic construct
  REGION 1..23: note = ATaRI peptide
SCSHRFSKVGPGPEGSHCSENIA

SEQ ID NO: 2782 - protein, 17 aa, synthetic construct
  REGION 1..17: note = ATaRI peptide
KGSAHEDQVGAGSPHVL

SEQ ID NO: 2783 - protein, 9 aa, synthetic construct
  REGION 1..9: note = ATaRI peptide
LAACSDYFR

SEQ ID NO: 2784 - protein, 55 aa, synthetic construct
  REGION 1..55: note = ATaRI peptide
SVDKHGRQISFSPEDEGGGQALSVPAGPQVYPAGSDRAACFQLWGQNQGSTIWEA

SEQ ID NO: 2785 - protein, 43 aa, synthetic construct
  REGION 1..43: note = ATaRI peptide
PPADTSWRRSVAGHPPPAPFLLETKPNSHHGYMWKSRTQSLKQ

SEQ ID NO: 2786 - protein, 49 aa, synthetic construct
  REGION 1..49: note = ATaRI peptide
SQDVHQKRGMDRGLGCLCWGEASPAGNPCSPGGHKLVGRWLFKGRLRPC

SEQ ID NO: 2787 - protein, 60 aa, synthetic construct
  REGION 1..60: note = ATaRI peptide
KQAWDTKKVRAYELSKTFFLLSLLKHHLGKGDKMAGWGGFTFPRQGTSLRFFHLQIQRIC

SEQ ID NO: 2788 - protein, 62 aa, synthetic construct
  REGION 1..62: note = ATaRI peptide
SPLSPITQVRGQGGGQVGGGKGKVEAWLYLLEGLLFLPGGHKTLRMLPTLLVFIIKFSSRVP

SEQ ID NO: 2789 - protein, 229 aa, synthetic construct
  REGION 1..229: note = ATaRI peptide
SMGIDIASVSPGWGPSGPDWGSCRGQPGGCRTVGLPAAWARGQNPSERCLGPPLHGATPWNQTETVTPCRDGETEARAGGWPQIPPKVGHPMFNCRAPLLGLSGPSHLKPGFLGGKKSTAFSGPGRRPGAGDDVSLSEKERRGQSKRRQPVGHSAWGPGLGAAAQTIGLFCLGPAQADKGWALTLYPQTFLTVQTTCLLQRRGLGGKQLHWATSRETGTCVPGTMSPPT

SEQ ID NO: 2790 - protein, 39 aa, synthetic construct
  REGION 1..39: note = ATaRI peptide
GIPNIILTGEARPGARVRRPKGPQPVRRQPETAVPQQEG

SEQ ID NO: 2791 - protein, 9 aa, synthetic construct
  REGION 1..9: note = ATaRI peptide
KDLPIHACR

SEQ ID NO: 2792 - protein, 41 aa, synthetic construct
  REGION 1..41: note = ATaRI peptide
DKKLKESQVMCARGLGLGWALALTALSSGFQREVFSPGCGS

SEQ ID NO: 2793 - protein, 23 aa, synthetic construct
  REGION 1..23: note = ATaRI peptide
TAERELLMVSAPPACKRACGLAA

SEQ ID NO: 2794 - protein, 38 aa, synthetic construct
  REGION 1..38: note = ATaRI peptide
EPTHDILQVGVGIPHSRSCVTSVWGHLFPVSWMAEYRL

SEQ ID NO: 2795 - protein, 9 aa, synthetic construct
  REGION 1..9: note = ATaRI peptide
MRDQSGVQV

SEQ ID NO: 2796 - protein, 45 aa, synthetic construct
  REGION 1..45: note = ATaRI peptide
RQAGVGCAGRCREGMGAGAVCGWVMGQRLSPYPYPCPCPSHSRAP

SEQ ID NO: 2797 - protein, 83 aa, synthetic construct
  REGION 1..83: note = ATaRI peptide
PWPWDTGKVSLRHTEQGWGPFHRQGDHKGVHGTPLQWSYAGSESVLTGVEHCCVSRLGTSQSWLLGLHMCWGREDNGCQWLWP

SEQ ID NO: 2798 - protein, 12 aa, synthetic construct
  REGION 1..12: note = ATaRI peptide
LSELYCQEVRTY

SEQ ID NO: 2799 - protein, 58 aa, synthetic construct
  REGION 1..58: note = ATaRI peptide
CRLLFQLAVSTAARERGCPAGTMTLGHTCPICKEQQSPRCADPLGLAHGVGGDMGTFP

SEQ ID NO: 2800 - protein, 19 aa, synthetic construct
  REGION 1..19: note = ATaRI peptide
THYLDAGQVCGASQASCWL

SEQ ID NO: 2801 - protein, 26 aa, synthetic construct
  REGION 1..26: note = ATaRI peptide
QKEATAQKVRACLPSFLGQQERLALP

SEQ ID NO: 2802 - protein, 71 aa, synthetic construct
  REGION 1..71: note = ATaRI peptide
VQNLLETQGEWPGPSRAASASGLQGCCPVGSFQHTAEAGAGLPSQDGPGWAWQGHRQCHCGVWTLSSGWGL

SEQ ID NO: 2803 - protein, 12 aa, synthetic construct
  REGION 1..12: note = ATaRI peptide
HEMVANPSGRCE

SEQ ID NO: 2804 - protein, 12 aa, synthetic construct
  REGION 1..12: note = ATaRI peptide
HEMIAKSPGRCE

SEQ ID NO: 2805 - protein, 29 aa, synthetic construct
  REGION 1..29: note = ATaRI peptide
NYKNLVFLGENNFHTQFLICPKCFMSLFL

SEQ ID NO: 2806 - protein, 10 aa, synthetic construct
  REGION 1..10: note = ATaRI peptide
HEMVDEPPGR

SEQ ID NO: 2807 - protein, 9 aa, synthetic construct
  REGION 1..9: note = ATaRI peptide
AHEIIETIR

SEQ ID NO: 2808 - protein, 18 aa, synthetic construct
  REGION 1..18: note = ATaRI peptide
AIDSIHQLVGGLPLPRGG

SEQ ID NO: 2809 - protein, 38 aa, synthetic construct
  REGION 1..38: note = ATaRI peptide
LHTIDRTIVSISLRLSRRAVLVFHPAHVTLLSPFSCGL

SEQ ID NO: 2810 - protein, 23 aa, synthetic construct
  REGION 1..23: note = ATaRI peptide
SLKNPKLRVSLCVFSLGLITRMH

SEQ ID NO: 2811 - protein, 40 aa, synthetic construct
  REGION 1..40: note = ATaRI peptide
LPSRAERAVSGSQVAVPKGHVEAKQSGVLETWLTLRSLTL

SEQ ID NO: 2812 - protein, 91 aa, synthetic construct
  REGION 1..91: note = ATaRI peptide
SEDEPSSARRVQGPGGGRGLAAGAGGACSLCVCGWVGGEDRQALRGCPGWEEGVCFVRGLPTGPGPRSGQGRPPGPFGVGHEQGHRLEEAS

SEQ ID NO: 2813 - protein, 10 aa, synthetic construct
  REGION 1..10: note = ATaRI peptide
SPPKTLENGE

SEQ ID NO: 2814 - protein, 27 aa, synthetic construct
  REGION 1..27: note = ATaRI peptide
TIRLPTFKVSAGRARLRGSMGSGGPSS

SEQ ID NO: 2815 - protein, 42 aa, synthetic construct
  REGION 1..42: note = ATaRI peptide
ADVEVTYTGKSQAGSVRGPQVPREVAPQAGVAQPVEPVQNLA

SEQ ID NO: 2816 - protein, 10 aa, synthetic construct
  REGION 1..10: note = ATaRI peptide
ITKEDRLKGM

SEQ ID NO: 2817 - protein, 11 aa, synthetic construct
  REGION 1..11: note = ATaRI peptide
IKCDFEFKGKQ

SEQ ID NO: 2818 - protein, 21 aa, synthetic construct
  REGION 1..21: note = ATaRI peptide
SHTVEPKRVCILLTLLILHII

SEQ ID NO: 2819 - protein, 43 aa, synthetic construct
  REGION 1..43: note = ATaRI peptide
IRTPADIYRWEALTAAGQSAGLASLSATEPLLEKVDCNTEDPH

SEQ ID NO: 2820 - protein, 30 aa, synthetic construct
  REGION 1..30: note = ATaRI peptide
AVPQDVVRVSVCPAPPGSGPELRRELEATV

SEQ ID NO: 2821 - protein, 9 aa, synthetic construct
  REGION 1..9: note = ATaRI peptide
YTYKRTHAA

SEQ ID NO: 2822 - protein, 9 aa, synthetic construct
  REGION 1..9: note = ATaRI peptide
SVKNPSIIR

SEQ ID NO: 2823 - protein, 12 aa, synthetic construct
  REGION 1..12: note = ATaRI peptide
LQAPTLVQGNYN

SEQ ID NO: 2824 - protein, 42 aa, synthetic construct
  REGION 1..42: note = ATaRI peptide
SLRERTRAVRLPSASPRFLWASYGLRVPMCGKDGAECCTLQH

SEQ ID NO: 2825 - protein, 12 aa, synthetic construct
  REGION 1..12: note = ATaRI peptide
LDQSARARCKHL

SEQ ID NO: 2826 - protein, 18 aa, synthetic construct
  REGION 1..18: note = ATaRI peptide
DGMVHLLPGKPVKHRCFC

SEQ ID NO: 2827 - protein, 37 aa, synthetic construct
  REGION 1..37: note = ATaRI peptide
FNTVGSKEGIIFLIVAIIPLKQMIKILILPHPCFFFF

SEQ ID NO: 2828 - protein, 53 aa, synthetic construct
  REGION 1..53: note = ATaRI peptide
PEDFMDEEVRVQNFNCQLAGGTGLVGCCNCLLSPQKVQCTISSLFVRLYLLGI

SEQ ID NO: 2829 - protein, 13 aa, synthetic construct
  REGION 1..13: note = ATaRI peptide
RRPRRQKPGVYVN

SEQ ID NO: 2830 - protein, 19 aa, synthetic construct
  REGION 1..19: note = ATaRI peptide
APELSANQVFGASRFSLPR

SEQ ID NO: 2831 - protein, 51 aa, synthetic construct
  REGION 1..51: note = ATaRI peptide
RLPPVFCPSECRALWFAHFYQCVIALRWGQCDLEPTKHTCLLLVYMFSVIF

SEQ ID NO: 2832 - protein, 21 aa, synthetic construct
  REGION 1..21: note = ATaRI peptide
VSPQELLRRWVVGDGGFFRNL

SEQ ID NO: 2833 - protein, 19 aa, synthetic construct
  REGION 1..19: note = ATaRI peptide
PQDPAIVQVTDGKFVLEYR

SEQ ID NO: 2834 - protein, 15 aa, synthetic construct
  REGION 1..15: note = ATaRI peptide
TELIQVSRSECSRQP

SEQ ID NO: 2835 - protein, 57 aa, synthetic construct
  REGION 1..57: note = ATaRI peptide
DLNRWRAGRLVSVVCIRCIPRDSVTMHSFMCACVIDSIRYCKEGSKDFLVTFIFRII

SEQ ID NO: 2836 - protein, 17 aa, synthetic construct
  REGION 1..17: note = ATaRI peptide
HVGRSKAQVTIFLIPFL

SEQ ID NO: 2837 - protein, 38 aa, synthetic construct
  REGION 1..38: note = ATaRI peptide
VMNALDNRGEVILILLISQYFLSPISNLFTNLIFIRLL

SEQ ID NO: 2838 - protein, 22 aa, synthetic construct
  REGION 1..22: note = ATaRI peptide
GQVTTIKKVKKSFIFLTSQIFI

SEQ ID NO: 2839 - protein, 35 aa, synthetic construct
  REGION 1..35: note = ATaRI peptide
DWAEVQSQGKEYILVLEHLSWKYPRVKSLYSPVVA

SEQ ID NO: 2840 - protein, 29 aa, synthetic construct
  REGION 1..29: note = ATaRI peptide
GAELIWDKVRFDNVWQVLTCQKCVLVLEM

SEQ ID NO: 2841 - protein, 23 aa, synthetic construct
  REGION 1..23: note = ATaRI peptide
PASQQPGPVSWAGRIRASPGGSR

SEQ ID NO: 2842 - protein, 16 aa, synthetic construct
  REGION 1..16: note = ATaRI peptide
MMEKKLSKGMIPHESW

SEQ ID NO: 2843 - protein, 27 aa, synthetic construct
  REGION 1..27: note = ATaRI peptide
GEACIGGDVSSRCTCWVKSVFLEKLDN

SEQ ID NO: 2844 - protein, 67 aa, synthetic construct
  REGION 1..67: note = ATaRI peptide
SLSPVSNKRWVPASSAALPTPCLPSAARGGSQLPPQPCPCGSWWARLKGASQGIVAWSCDCVLPQSP

SEQ ID NO: 2845 - protein, 62 aa, synthetic construct
  REGION 1..62: note = ATaRI peptide
LPPGLPTQGRSALPPHPASPPIPTTSSLHESLPATPLFTQCPLCAKGFKHSPLFHLHGSPIR

SEQ ID NO: 2846 - protein, 41 aa, synthetic construct
  REGION 1..41: note = ATaRI peptide
RRRTPRENGANCLMLSLLIIYLVLCLLCRRDKAPRPRALSV

SEQ ID NO: 2847 - protein, 86 aa, synthetic construct
  REGION 1..86: note = ATaRI peptide
AVARGRQMVRARAQRGGQLSGSWGGLLRCKQLLLHIPYLASFHCQAEVSWLPWDVGADGSFFLCGPSGCNLGLKCGSLKVRRVPID

SEQ ID NO: 2848 - protein, 17 aa, synthetic construct
  REGION 1..17: note = ATaRI peptide
VHSPAPSSGVALALSSS

SEQ ID NO: 2849 - protein, 58 aa, synthetic construct
  REGION 1..58: note = ATaRI peptide
QAAANGKAGGRGGAPSRAGGVHGLPPSSPDPQRIPRAGFFLLPGEMPTHNQLFFFFFL

SEQ ID NO: 2850 - protein, 11 aa, synthetic construct
  REGION 1..11: note = ATaRI peptide
KGLGPRAPGKG

SEQ ID NO: 2851 - protein, 10 aa, synthetic construct
  REGION 1..10: note = ATaRI peptide
EMFGRHCPGE

SEQ ID NO: 2852 - protein, 34 aa, synthetic construct
  REGION 1..34: note = ATaRI peptide
SLPISWDYRCVPPCLAKFCIFSRDRISPSWPGLS

SEQ ID NO: 2853 - protein, 9 aa, synthetic construct
  REGION 1..9: note = ATaRI peptide
WGFVKPCPR

SEQ ID NO: 2854 - protein, 10 aa, synthetic construct
  REGION 1..10: note = ATaRI peptide
KMSQGHCAGE

SEQ ID NO: 2855 - protein, 28 aa, synthetic construct
  REGION 1..28: note = ATaRI peptide
GLLKAMYQVCWCFLDFLNTCLLFKTSRY

SEQ ID NO: 2856 - protein, 27 aa, synthetic construct
  REGION 1..27: note = ATaRI peptide
VTAQLDSKVSPLHSSGFQILLKCSRFS

SEQ ID NO: 2857 - protein, 32 aa, synthetic construct
  REGION 1..32: note = ATaRI peptide
DSPNRHSKVSLGPTLPYRGSQACLGVASELHT

SEQ ID NO: 2858 - protein, 78 aa, synthetic construct
  REGION 1..78: note = ATaRI peptide
PEQERDTGVRRALSPAPDPQLPRGSQIWAGKEKGCAPHGHASSFPSCPQPLASASPVGGYGLMAGSEGSALVWDGITG

SEQ ID NO: 2859 - protein, 39 aa, synthetic construct
  REGION 1..39: note = ATaRI peptide
GSGFPEKKCEPGPPGTGAVVTPRLGGGDARAGAHLEVKG

SEQ ID NO: 2860 - protein, 15 aa, synthetic construct
  REGION 1..15: note = ATaRI peptide
IEYDKLRKVSVSSSP

SEQ ID NO: 2861 - protein, 79 aa, synthetic construct
  REGION 1..79: note = ATaRI peptide
LHPARGPQGMWHPPPPPPAHPNPRVALALNPTLDPVTDTSSLTWKWRQTPAFHPYPGSSAGLSPSTHWLQVLRTHATPT

SEQ ID NO: 2862 - protein, 101 aa, synthetic construct
  REGION 1..101: note = ATaRI peptide
RRELLFNEVRALLPCRPAGPPTPPSHPPSPPPSSPCTPPCWARLPSSPHSSPSPGRLVRPSWVPASVLTAPSPTSLSLSPRPRVPRATDPRPSVFQAPRTH

SEQ ID NO: 2863 - protein, 63 aa, synthetic construct
  REGION 1..63: note = ATaRI peptide
VYYNELETRYSAHSYLISLDLCFLRPWGMQEPPWRSFVPKNLSYALVNKSSRCLVMHMSWTWF

SEQ ID NO: 2864 - protein, 18 aa, synthetic construct
  REGION 1..18: note = ATaRI peptide
HPASIPAKVQLLPQPGAL

SEQ ID NO: 2865 - protein, 116 aa, synthetic construct
  REGION 1..116: note = ATaRI peptide
NLWTVKCKVCALISGLGGGGRMREAALWGRSVCLSRVSVACQSLGPSVSIPHSTLLTGYLPPPSSWLSILLSLSSLGPTLFFLLLSPSPFPVSFPPSCHLSQICLSSSRLGRNGPR

SEQ ID NO: 2866 - protein, 31 aa, synthetic construct
  REGION 1..31: note = ATaRI peptide
NYSNLVSLGKVSFEIVYNLFSGVSAFSTVKL

SEQ ID NO: 2867 - protein, 33 aa, synthetic construct
  REGION 1..33: note = ATaRI peptide
HRDLKSINSKWCPLPKIPSTEPLKARPRWWETG

SEQ ID NO: 2868 - protein, 10 aa, synthetic construct
  REGION 1..10: note = ATaRI peptide
FSKSSDVWRC

SEQ ID NO: 2869 - protein, 15 aa, synthetic construct
  REGION 1..15: note = ATaRI peptide
IPRLRAIRREYLPRP

SEQ ID NO: 2870 - protein, 92 aa, synthetic construct
  REGION 1..92: note = ATaRI peptide
QVELIRNSRCAAPPPAQHPTARPPTFSWAHWGEPAATSTAGLARAQSRTVLQGSGRVCFLPENPILGLRCWPVCPLPVPCSLLERGGLTVPF

SEQ ID NO: 2871 - protein, 117 aa, synthetic construct
  REGION 1..117: note = ATaRI peptide
HPELCKALGEQLRPPRPRGAKSTLETRPVLGEAGGPAPGGDRSGAACHSGGPWPPGCGWGGLWRIRMAEGALGSGSCCAEACGVTPRVAGPRCSSPQGSKQQKSWSLIPGQHRGREG

SEQ ID NO: 2872 - protein, 9 aa, synthetic construct
  REGION 1..9: note = ATaRI peptide
PYDQLIIDG

SEQ ID NO: 2873 - protein, 20 aa, synthetic construct
  REGION 1..20: note = ATaRI peptide
VDGDHVILVSGTPMSQNVAA

SEQ ID NO: 2874 - protein, 24 aa, synthetic construct
  REGION 1..24: note = ATaRI peptide
HPNVMRLIGERGADSRGLQAPWGP

SEQ ID NO: 2875 - protein, 12 aa, synthetic construct
  REGION 1..12: note = ATaRI peptide
DFENELETVSGR

SEQ ID NO: 2876 - protein, 9 aa, synthetic construct
  REGION 1..9: note = ATaRI peptide
TGTAAAPGG

SEQ ID NO: 2877 - protein, 20 aa, synthetic construct
  REGION 1..20: note = ATaRI peptide
GSHGTCASVSRSPALFPLGP

SEQ ID NO: 2878 - protein, 19 aa, synthetic construct
  REGION 1..19: note = ATaRI peptide
CNSRTMTDVSWYFSLHEIL

SEQ ID NO: 2879 - protein, 73 aa, synthetic construct
  REGION 1..73: note = ATaRI peptide
PGARGAATGRFGPAPRGRGGAARGLDGPRRRWEADGPPGAKPGPAGRAFTPWGLLIPSEGLASPRAPLLTLLL

SEQ ID NO: 2880 - protein, 74 aa, synthetic construct
  REGION 1..74: note = ATaRI peptide
PTSTPLRRVSISHGVPAHQCSRISERCQSPLGHPGVLWQSERGHGLGPGTRRGVLPGIKTHSVQFCIRCDAPGT

SEQ ID NO: 2881 - protein, 10 aa, synthetic construct
  REGION 1..10: note = ATaRI peptide
RRKNDHIQGE

SEQ ID NO: 2882 - protein, 13 aa, synthetic construct
  REGION 1..13: note = ATaRI peptide
KNKLRLQRVRHFP

SEQ ID NO: 2883 - protein, 71 aa, synthetic construct
  REGION 1..71: note = ATaRI peptide
PKTPQAPKVSSRLPLLLGFSSARLFLSESERVSPQPASLIRREGASSDLGHFHFWLSLEAQYFVLRFVPKR

SEQ ID NO: 2884 - protein, 70 aa, synthetic construct
  REGION 1..70: note = ATaRI peptide
KKRRHDGQVRWGGQVGASAGLFFFCLFFVVLFFFRDGVLLCHPGWSAVAQSQLTATSSLLGSSDSPALAS

SEQ ID NO: 2885 - protein, 65 aa, synthetic construct
  REGION 1..65: note = ATaRI peptide
GRRRFTTPVSGPRGSGPGGIHTEHRVTRARRQSLRHKPVSLQGPGGQEDISPGSKDIDMRSSGSQ

SEQ ID NO: 2886 - protein, 17 aa, synthetic construct
  REGION 1..17: note = ATaRI peptide
HASYSAPPVSTRGGEPV

SEQ ID NO: 2887 - protein, 109 aa, synthetic construct
  REGION 1..109: note = ATaRI peptide
KRKTPALKVGEDQGGLALHPLALMSRLAACSPALFFFFFLRQGLTLSPRLECSGVISTRCNLRLPGSSNSSASASLVAGITGTCHRTWLIFVFLLETGIHQVPKLVLNS

SEQ ID NO: 2888 - protein, 28 aa, synthetic construct
  REGION 1..28: note = ATaRI peptide
PEAELEREVSREGAGSPCLHSTRLWSIY

SEQ ID NO: 2889 - protein, 59 aa, synthetic construct
  REGION 1..59: note = ATaRI peptide
SLAVSRSTGEQPSTVPAHSLMQDEVGRTPQRCLCLGVHEVHLSFLLTGCIPPCQLRWAP

SEQ ID NO: 2890 - protein, 49 aa, synthetic construct
  REGION 1..49: note = ATaRI peptide
RPHVSPRHRYPPPDLRPLILDHGDSKRLEATHETLEQRAAWVNPPHCLF

SEQ ID NO: 2891 - protein, 9 aa, synthetic construct
  REGION 1..9: note = ATaRI peptide
LAAESPVNM

SEQ ID NO: 2892 - protein, 10 aa, synthetic construct
  REGION 1..10: note = ATaRI peptide
LVQNDFAGSE

SEQ ID NO: 2893 - protein, 9 aa, synthetic construct
  REGION 1..9: note = ATaRI peptide
GMADGDFVR

SEQ ID NO: 2894 - protein, 9 aa, synthetic construct
  REGION 1..9: note = ATaRI peptide
RGRKISPPR

SEQ ID NO: 2895 - protein, 9 aa, synthetic construct
  REGION 1..9: note = ATaRI peptide
SPTYDPYKR

SEQ ID NO: 2896 - protein, 47 aa, synthetic construct
  REGION 1..47: note = ATaRI peptide
GYGPRRRSRCVWLGVEVGGAGGARSPILGRRCSEGGNLAVQLREHPI

SEQ ID NO: 2897 - protein, 40 aa, synthetic construct
  REGION 1..40: note = ATaRI peptide
SLPQGSKISKSRPCPVLAGSASLPACLTCVCGHWEGALWM

SEQ ID NO: 2898 - protein, 34 aa, synthetic construct
  REGION 1..34: note = ATaRI peptide
ESGDLRSQGECLGLPLTATSPLLPQHLPTLTPGH

SEQ ID NO: 2899 - protein, 18 aa, synthetic construct
  REGION 1..18: note = ATaRI peptide
PEEVEQQKRWGWALGGEP

SEQ ID NO: 2900 - protein, 47 aa, synthetic construct
  REGION 1..47: note = ATaRI peptide
WFHRLRSIGKGECGGGPQPTWGMGYRAVGWGRTGTYTLKAHPPVWAT

SEQ ID NO: 2901 - protein, 9 aa, synthetic construct
  REGION 1..9: note = ATaRI peptide
NEIWHLREQ

SEQ ID NO: 2902 - protein, 34 aa, synthetic construct
  REGION 1..34: note = ATaRI peptide
TVFSAPNYWYVFAFPAQGLYQATGFCLGFCFAFL

SEQ ID NO: 2903 - protein, 69 aa, synthetic construct
  REGION 1..69: note = ATaRI peptide
SETTMVKKVCVTWGQRSETLGPWRGQAMTIEKDKSKHFLKGWGGCLSHLKGGCHSLVSASCCCEGMWAQ

SEQ ID NO: 2904 - protein, 18 aa, synthetic construct
  REGION 1..18: note = ATaRI peptide
ILAQEIVKVKHHCGAENC

SEQ ID NO: 2905 - protein, 10 aa, synthetic construct
  REGION 1..10: note = ATaRI peptide
EALIRRYQVP

SEQ ID NO: 2906 - protein, 160 aa, synthetic construct
  REGION 1..160: note = ATaRI peptide
SISDRKSKVGARQRLEPWLRFSVVCFCFFLLSDAHLSCVSIFQYLSLSLCIWLCFSLPPPPSPPPAPPLLVPPVPSLSRLELVCFSLSLSLLLLLPVFLFLLAFLPSPLLLSAACPSLSLSVSLFLALWCMLAHSSSVPISPPFLALCVCLVGSLYLVCL

SEQ ID NO: 2907 - protein, 9 aa, synthetic construct
  REGION 1..9: note = ATaRI peptide
WDAEKTDGM

SEQ ID NO: 2908 - protein, 55 aa, synthetic construct
  REGION 1..55: note = ATaRI peptide
PGRLFPITVSTSPSSHIPRPPTWSLSKPGHASSLCCCISHLFHLKMFSFFKATIF

SEQ ID NO: 2909 - protein, 60 aa, synthetic construct
  REGION 1..60: note = ATaRI peptide
LSVADQDKVSQEARVGQAGGLHESGVAAHRTCVTPQTQGSGAVLVQSRSHLVAEPGCEPR

SEQ ID NO: 2910 - protein, 45 aa, synthetic construct
  REGION 1..45: note = ATaRI peptide
GIRFVVDSGKDHHEPLPTTPKDLGAWGPEVCVCGRGAPAWIGKYS

SEQ ID NO: 2911 - protein, 41 aa, synthetic construct
  REGION 1..41: note = ATaRI peptide
ALDSLVLQVRHGQKGDYILTAGTGRNLGGLFYFILFYFILR

SEQ ID NO: 2912 - protein, 15 aa, synthetic construct
  REGION 1..15: note = ATaRI peptide
QLPVDVVIGEYPPPS

SEQ ID NO: 2913 - protein, 131 aa, synthetic construct
  REGION 1..131: note = ATaRI peptide
ANLRRQFKVRLGRRGKAGPTQADVCKHTPEHCFPFPDSGQTRIPPCTHLPHHPVTRCWGSWAEQREQKSRRASWRGGPSQWTCSILGKSSPSGLGMLSWLHGHGVGGSLRLWLAGTSGARHLSHRSQLCHF

SEQ ID NO: 2914 - protein, 30 aa, synthetic construct
  REGION 1..30: note = ATaRI peptide
YGGINRVRVSMVPGACSAYSETHLTHPLCP

SEQ ID NO: 2915 - protein, 23 aa, synthetic construct
  REGION 1..23: note = ATaRI peptide
SIPRSWDYRCLPPHPANFCIYLF

SEQ ID NO: 2916 - protein, 85 aa, synthetic construct
  REGION 1..85: note = ATaRI peptide
RLFYRGKQVHPPPAPLFYAWSRPRASAATSRYFLPPTSPPNNLVRSHFISPGRRSPQKPQMPARGRNKGRTHRLTRWAGGWPSNL

SEQ ID NO: 2917 - protein, 9 aa, synthetic construct
  REGION 1..9: note = ATaRI peptide
CFLLGVGCR

SEQ ID NO: 2918 - protein, 15 aa, synthetic construct
  REGION 1..15: note = ATaRI peptide
VTRGQRKLGKELRVA

SEQ ID NO: 2919 - protein, 29 aa, synthetic construct
  REGION 1..29: note = ATaRI peptide
EGRGDTDKVSWPGERWGGADSSVENMDRN

SEQ ID NO: 2920 - protein, 13 aa, synthetic construct
  REGION 1..13: note = ATaRI peptide
RPCYGLEPGKRFP

SEQ ID NO: 2921 - protein, 9 aa, synthetic construct
  REGION 1..9: note = ATaRI peptide
DFKKMREQM

SEQ ID NO: 2922 - protein, 110 aa, synthetic construct
  REGION 1..110: note = ATaRI peptide
LCHSEPTRGRLRWRPLRSTCGPGRTHLALSGHGPKGFAAHNQEGHQSPPSSPRSMEVNGKTGLSQPRSTWPVSLRLQPCSSYWAPGLAVGAPTPGLPLRFEAGGVTDAAS

SEQ ID NO: 2923 - protein, 9 aa, synthetic construct
  REGION 1..9: note = ATaRI peptide
LNPSWPWLR

SEQ ID NO: 2924 - protein, 47 aa, synthetic construct
  REGION 1..47: note = ATaRI peptide
NCQDLFLLGECCLSPGAYSLPCLVITHALYHPQGEVLAPGLLRISMT

SEQ ID NO: 2925 - protein, 17 aa, synthetic construct
  REGION 1..17: note = ATaRI peptide
YRRLANSEKYAGRAGRT

SEQ ID NO: 2926 - protein, 55 aa, synthetic construct
  REGION 1..55: note = ATaRI peptide
ISRAQTLKVRAGQVGGFSQMPQVWPPGPGPPSHSLSTWLGASCSVCLSRLPAGAA

SEQ ID NO: 2927 - protein, 25 aa, synthetic construct
  REGION 1..25: note = ATaRI peptide
LPCLEISQVGTRAPGRQLGAGGPPV

SEQ ID NO: 2928 - protein, 54 aa, synthetic construct
  REGION 1..54: note = ATaRI peptide
CSLNLRDSGEPPTLASQVAGTAGTCHLFLLFFVEIGSRHVAQAGTETLLSGGIF

SEQ ID NO: 2929 - protein, 9 aa, synthetic construct
  REGION 1..9: note = ATaRI peptide
SLKAKLLRR

SEQ ID NO: 2930 - protein, 9 aa, synthetic construct
  REGION 1..9: note = ATaRI peptide
EQTKRPGLS

SEQ ID NO: 2931 - protein, 57 aa, synthetic construct
  REGION 1..57: note = ATaRI peptide
KQEASSDEGEWGVPRSALISPAPRSAAAGGGAWLPCGFLPPLPGSPPLNPGLSVALP

SEQ ID NO: 2932 - protein, 138 aa, synthetic construct
  REGION 1..138: note = ATaRI peptide
TLFYPYCQVGRRASRVPENPRQGRWERARDRAPHTPPSLTQGRVLASTPSCEGLFLTAVGRAWSLGFIGMKLTNVPMCNMSHGGWGRGRLRRLGVTALRERPCLVGAEMGRVVWECSEGPGTPPGWPGGAPANPGLSS

SEQ ID NO: 2933 - protein, 165 aa, synthetic construct
  REGION 1..165: note = ATaRI peptide
KCCLQVHASECHCGAQRSCALLQGVGGGAGGGSILPCGGPHRPLSPGCTFRARAGASPGDFLQFLTFSSFPLWSHHLEQGERLWPWKGWMTACHPGAGQGLHRPQHPEDASAGPGAGLWCQPLRRKPLLQGALGSSHPVPDTQKLTLGPEQEMGQAPRLSAGCVP

SEQ ID NO: 2934 - protein, 19 aa, synthetic construct
  REGION 1..19: note = ATaRI peptide
PKRVRSRLVSARGWPGGSG

SEQ ID NO: 2935 - protein, 10 aa, synthetic construct
  REGION 1..10: note = ATaRI peptide
EVSHQRCQGE

SEQ ID NO: 2936 - protein, 50 aa, synthetic construct
  REGION 1..50: note = ATaRI peptide
NYRNLEAVGEENVPADMRSLLLSVLALPGFVFSFVILPHTWFFCLIVCLV

SEQ ID NO: 2937 - protein, 90 aa, synthetic construct
  REGION 1..90: note = ATaRI peptide
VSQVAEITGVCHHTLLIFVFVFYFIFESYSVALAGVQWCDLGSLQPPPSRFKRSSNLSLPSSWAYQCPPSPATFCIFSRYGVSPCWPGCC

SEQ ID NO: 2938 - protein, 34 aa, synthetic construct
  REGION 1..34: note = ATaRI peptide
GVRDGSFSGEMICWVDCSVSFLSEILGLGVGNLL

SEQ ID NO: 2939 - protein, 53 aa, synthetic construct
  REGION 1..53: note = ATaRI peptide
NYRNLVSLGEDNFPPEVGMCPCVSLYFLFFLDTMSCSVTQGGVKWCDHVLLQS

SEQ ID NO: 2940 - protein, 110 aa, synthetic construct
  REGION 1..110: note = ATaRI peptide
NYRNLVSLGEDDFPPGDVPLRIFVFSLLFFFFFFFFEMESRSVAQAGVLWHDLGSRPAPPPGFTPFSYFSLPSSWDYRHPPTCLANFLYYFLLETEFHHVSQDGLEILTS

SEQ ID NO: 2941 - protein, 10 aa, synthetic construct
  REGION 1..10: note = ATaRI peptide
VSFVVGGLGA

SEQ ID NO: 2942 - protein, 13 aa, synthetic construct
  REGION 1..13: note = ATaRI peptide
FHESTEGKVRRER

SEQ ID NO: 2943 - protein, 62 aa, synthetic construct
  REGION 1..62: note = ATaRI peptide
STDSEVSQVGVSLDRVGTPFTPLLLPKGILRPERRPLCWAGGHRWLRNQCCPEGRWAGQVDR

SEQ ID NO: 2944 - protein, 20 aa, synthetic construct
  REGION 1..20: note = ATaRI peptide
FSTAPEIKVGSSDIPRASVS

SEQ ID NO: 2945 - protein, 59 aa, synthetic construct
  REGION 1..59: note = ATaRI peptide
PYSYYYPMVSAQPVGRGRARWSLLGRGEVKWSLPGWGWVVDGLEIAVITAQKPSNLPRR

SEQ ID NO: 2946 - protein, 87 aa, synthetic construct
  REGION 1..87: note = ATaRI peptide
SPVLPAALGWFPAPASVFNPFISLLSHVSLFLLWIPAPSALVPEVFPALPLHFLLAWFTEWFFWASFFAGKSHMQTDMFSAPMGPVG

SEQ ID NO: 2947 - protein, 39 aa, synthetic construct
  REGION 1..39: note = ATaRI peptide
RETGGKEEVSGACSALPGPCRCPSVPSLIPAWPGPWSRD

SEQ ID NO: 2948 - protein, 65 aa, synthetic construct
  REGION 1..65: note = ATaRI peptide
KEKSSNSDRYPSFLAKLKGQGVFCCCCFVFEMESRSVAQTGVQWCDLGSPQLHLLGSSNSPASAS

SEQ ID NO: 2949 - protein, 30 aa, synthetic construct
  REGION 1..30: note = ATaRI peptide
KTSGSKERVSINFLTRVFCSSFQFVFLCAS

SEQ ID NO: 2950 - protein, 62 aa, synthetic construct
  REGION 1..62: note = ATaRI peptide
GIKEKTIAVSVPVPTPQHWQGPHHHGTGPVPAMQPLPGPRRGKPWALEAGLSGLELALSSPP

SEQ ID NO: 2951 - protein, 83 aa, synthetic construct
  REGION 1..83: note = ATaRI peptide
MGLAWTAMGERGGGRRPQSHSHFYPRTSRSHLVHLCSGPQVALNGLWRGVVCWEPRGSGLREGKAVTHGGGSTPWALWIWVPL

SEQ ID NO: 2952 - protein, 155 aa, synthetic construct
  REGION 1..155: note = ATaRI peptide
QEKLAIAEVSPAPPHCCPLPRAGGAPQSLQRPCLWELLGPGETGGTCGRGADGAVRDTPDACEQLQVARVGAGFRAWDCPKHRPPPSGHTLCLPGPPGCPMVGPPPGPECREGFWQPEAVGPVAPTQNEAWRRSGFSEEHAGAHISHVFFFLQRC

SEQ ID NO: 2953 - protein, 60 aa, synthetic construct
  REGION 1..60: note = ATaRI peptide
AVLTDRAQVSGRWLRGCRFLASAEAVSEVGGSPGIPWICLRSRRSLWCVELVCHLIYTWP

SEQ ID NO: 2954 - protein, 22 aa, synthetic construct
  REGION 1..22: note = ATaRI peptide
DLSQDTCPGRSQDLGRLESLLA

SEQ ID NO: 2955 - protein, 22 aa, synthetic construct
  REGION 1..22: note = ATaRI peptide
DLSQGTCPGRSQDLGRSESLLA

SEQ ID NO: 2956 - protein, 78 aa, synthetic construct
  REGION 1..78: note = ATaRI peptide
PAEWELEEGICYGWVQIEPSTCFVFVSVLLPRPIVILHIYFTFLILGTFSICHFSRVFHPLGVFPLFWPPCFNCSLQH

SEQ ID NO: 2957 - protein, 9 aa, synthetic construct
  REGION 1..9: note = ATaRI peptide
DLDTYILPG

SEQ ID NO: 2958 - protein, 49 aa, synthetic construct
  REGION 1..49: note = ATaRI peptide
LTQVLDKRGKGAPWAASRHTRDTPWTGTWEHRALVWGCSCTHSHICTLP

SEQ ID NO: 2959 - protein, 69 aa, synthetic construct
  REGION 1..69: note = ATaRI peptide
NFALVSSLGKSLTLSPSTLTTPSFSPCEVLSITKPDHGGSFLPRFPVVGIVGGGTRWWDSAVCSFPAFL

SEQ ID NO: 2960 - protein, 9 aa, synthetic construct
  REGION 1..9: note = ATaRI peptide
PPASWTCGR

SEQ ID NO: 2961 - protein, 9 aa, synthetic construct
  REGION 1..9: note = ATaRI peptide
PAKDDPESK

SEQ ID NO: 2962 - protein, 11 aa, synthetic construct
  REGION 1..11: note = ATaRI peptide
SGDRDNKKVGL

SEQ ID NO: 2963 - protein, 50 aa, synthetic construct
  REGION 1..50: note = ATaRI peptide
NRVKPYVHVSASSLNGIRARGPGRVLGGWTDLERHPRSWGGGCPSWQVFL

SEQ ID NO: 2964 - protein, 18 aa, synthetic construct
  REGION 1..18: note = ATaRI peptide
NCRNLASLGKPNVIPAFI

SEQ ID NO: 2965 - protein, 56 aa, synthetic construct
  REGION 1..56: note = ATaRI peptide
EQSRNMKMVRLTWVIPGFFHGRMPYMRKATRTGLVGQAQWLMPLIPAPWEAEAVGS

SEQ ID NO: 2966 - protein, 39 aa, synthetic construct
  REGION 1..39: note = ATaRI peptide
ERIIQNTEGRPSPHCPARPCCCSTGLSPCTHSLFEQQTE

SEQ ID NO: 2967 - protein, 35 aa, synthetic construct
  REGION 1..35: note = ATaRI peptide
KTTSGRLKGKGLPLPTSSGCHLGSVGTVLEWWALS

SEQ ID NO: 2968 - protein, 40 aa, synthetic construct
  REGION 1..40: note = ATaRI peptide
QKYVFASVVCILSLQTKGRLGAVAHVYNPSTLGGRGGQIT

SEQ ID NO: 2969 - protein, 57 aa, synthetic construct
  REGION 1..57: note = ATaRI peptide
ILKSAMSESKLAAHTSRVQSCRGGLLREPQARLTAHCGRHGTLSRTGFYVGGAQEQH

SEQ ID NO: 2970 - protein, 27 aa, synthetic construct
  REGION 1..27: note = ATaRI peptide
SSEESPQVVRGYPFARYSLSRHKDSCV

SEQ ID NO: 2971 - protein, 119 aa, synthetic construct
  REGION 1..119: note = ATaRI peptide
MSSNSASAGKAGTRPRARPVGVFPWNNVTFLFWDSTFHLQLQGPMVHATDPGPSSRCREFPGRRWMDGPGWHLDLWAGCQELSGAGVLTVQVLASRAAGSHAPSWGSGLVSVAGRALGG

SEQ ID NO: 2972 - protein, 9 aa, synthetic construct
  REGION 1..9: note = ATaRI peptide
LAMRLAFER

SEQ ID NO: 2973 - protein, 17 aa, synthetic construct
  REGION 1..17: note = ATaRI peptide
SIEAVQAICILLQEFNL

SEQ ID NO: 2974 - protein, 21 aa, synthetic construct
  REGION 1..21: note = ATaRI peptide
GFGINKMGGKKFKMKYKHNHF

SEQ ID NO: 2975 - protein, 30 aa, synthetic construct
  REGION 1..30: note = ATaRI peptide
WQLCPPHLVSSWVSACPEKVSASGPCHLMG

SEQ ID NO: 2976 - protein, 25 aa, synthetic construct
  REGION 1..25: note = ATaRI peptide
GAHQGACAGERAPGKERCCDSTSIQ

SEQ ID NO: 2977 - protein, 22 aa, synthetic construct
  REGION 1..22: note = ATaRI peptide
ETPSGVTMVRFPWDNSGSSFHV

SEQ ID NO: 2978 - protein, 39 aa, synthetic construct
  REGION 1..39: note = ATaRI peptide
LFSFMQKRGEPSAPTPLEGGHRNRAVGGALLAPGMSGRW

SEQ ID NO: 2979 - protein, 12 aa, synthetic construct
  REGION 1..12: note = ATaRI peptide
SNKQKAGMVGCS

SEQ ID NO: 2980 - protein, 65 aa, synthetic construct
  REGION 1..65: note = ATaRI peptide
GEHAGAAEVWYRPTLSRVGNKYPGPVGAGTRPLPSLTAFCLCPLDSPAFTLINPVLPSLRSDYEF

SEQ ID NO: 2981 - protein, 11 aa, synthetic construct
  REGION 1..11: note = ATaRI peptide
NSREKPKPVSV

SEQ ID NO: 2982 - protein, 19 aa, synthetic construct
  REGION 1..19: note = ATaRI peptide
IDIQHLCLSKLCNFPLVYK

SEQ ID NO: 2983 - protein, 18 aa, synthetic construct
  REGION 1..18: note = ATaRI peptide
HTADTKTAGYVSLNIPFK

SEQ ID NO: 2984 - protein, 18 aa, synthetic construct
  REGION 1..18: note = ATaRI peptide
PQIDYTVMVRAFVVDKLR

SEQ ID NO: 2985 - protein, 14 aa, synthetic construct
  REGION 1..14: note = ATaRI peptide
VDEYLQDQVMTHLG

SEQ ID NO: 2986 - protein, 50 aa, synthetic construct
  REGION 1..50: note = ATaRI peptide
HFAEQIAKVSILSEREIDILIFILANFGLNFNRKLNSNHNCYHCFLCDRH

SEQ ID NO: 2987 - protein, 25 aa, synthetic construct
  REGION 1..25: note = ATaRI peptide
SLPQCYQRVSFKYSKPLDFMLFSIS

SEQ ID NO: 2988 - protein, 12 aa, synthetic construct
  REGION 1..12: note = ATaRI peptide
EKRSLSDKVGKR

SEQ ID NO: 2989 - protein, 10 aa, synthetic construct
  REGION 1..10: note = ATaRI peptide
IEEKKAPKVI

SEQ ID NO: 2990 - protein, 31 aa, synthetic construct
  REGION 1..31: note = ATaRI peptide
QHYLELGRVSVQKTNPEEVSKMSSRYRAFIL

SEQ ID NO: 2991 - protein, 9 aa, synthetic construct
  REGION 1..9: note = ATaRI peptide
RILDPAYPE

SEQ ID NO: 2992 - protein, 9 aa, synthetic construct
  REGION 1..9: note = ATaRI peptide
AEFLFFIVQ

SEQ ID NO: 2993 - protein, 36 aa, synthetic construct
  REGION 1..36: note = ATaRI peptide
AKAIADDQVSELSWSLCEFTGRFGDNNHSGQGTRLV

SEQ ID NO: 2994 - protein, 34 aa, synthetic construct
  REGION 1..34: note = ATaRI peptide
YSYWSHTSVSTLMPQHCQLLPPFLFPCRFVFSLS

SEQ ID NO: 2995 - protein, 19 aa, synthetic construct
  REGION 1..19: note = ATaRI peptide
GAKGTRLKVFILANKWPDQ

SEQ ID NO: 2996 - protein, 50 aa, synthetic construct
  REGION 1..50: note = ATaRI peptide
VISALAEVVSFILHYKGSCVCSANILDDILLLFMKAVFLWPFSVILPFSF

SEQ ID NO: 2997 - protein, 16 aa, synthetic construct
  REGION 1..16: note = ATaRI peptide
TWLLRENLGMLTTSEK

SEQ ID NO: 2998 - protein, 12 aa, synthetic construct
  REGION 1..12: note = ATaRI peptide
KTEAIRMERSGG

SEQ ID NO: 2999 - protein, 25 aa, synthetic construct
  REGION 1..25: note = ATaRI peptide
SERSNSGEGEHSWLELQQQHFHFIL

SEQ ID NO: 3000 - protein, 11 aa, synthetic construct
  REGION 1..11: note = ATaRI peptide
EEEEEEEEGEI

SEQ ID NO: 3001 - protein, 34 aa, synthetic construct
  REGION 1..34: note = ATaRI peptide
ISVELKKKVWSRRTQESWRQSRACCGCIWVLTLN

SEQ ID NO: 3002 - protein, 34 aa, synthetic construct
  REGION 1..34: note = ATaRI peptide
FHWFKLVGRYVMILLMSSFKIMISFKCLKPEQII

SEQ ID NO: 3003 - protein, 10 aa, synthetic construct
  REGION 1..10: note = ATaRI peptide
RVAVQAIAGR

SEQ ID NO: 3004 - protein, 9 aa, synthetic construct
  REGION 1..9: note = ATaRI peptide
YADIFCQFK

SEQ ID NO: 3005 - protein, 52 aa, synthetic construct
  REGION 1..52: note = ATaRI peptide
LAFYHVQNVSDMDLFAKHMFFWYLGFLSPGRVIRRGTSHWLCRGRVDNRGRG

SEQ ID NO: 3006 - protein, 9 aa, synthetic construct
  REGION 1..9: note = ATaRI peptide
GSCQIRGDW

SEQ ID NO: 3007 - protein, 34 aa, synthetic construct
  REGION 1..34: note = ATaRI peptide
LKSSHNSSRWDTQSSVKKSTLAGVNWYTVRCLIH

SEQ ID NO: 3008 - protein, 24 aa, synthetic construct
  REGION 1..24: note = ATaRI peptide
QNCEEKNHGKDILVISHAEINLLC

SEQ ID NO: 3009 - protein, 22 aa, synthetic construct
  REGION 1..22: note = ATaRI peptide
MTLSAYLEVRRLGTSVDANSQP

SEQ ID NO: 3010 - protein, 9 aa, synthetic construct
  REGION 1..9: note = ATaRI peptide
SGYSKSPDS

SEQ ID NO: 3011 - protein, 9 aa, synthetic construct
  REGION 1..9: note = ATaRI peptide
REKELATKV

SEQ ID NO: 3012 - protein, 22 aa, synthetic construct
  REGION 1..22: note = ATaRI peptide
HGSVSDCKVSTLTVIFSQYVDN

SEQ ID NO: 3013 - protein, 185 aa, synthetic construct
  REGION 1..185: note = ATaRI peptide
PSKHQGPCGERPGVEARRGGLLLRQSLPGHHMPSSSIMFLLGSWEWAGPSGKALGRVEPVCGGYLDTWGLVRQRRGLVQAPWSLTSATPSLGVLWPVRMSPRCKHRLLGWAGWTQHQGPHSWDMGSRRPFWRQCQDLKGQGEAVAVVSRRVRLGQFAHLLVFLSASVSSLWSLLPCRLRLLCLPA

SEQ ID NO: 3014 - protein, 125 aa, synthetic construct
  REGION 1..125: note = ATaRI peptide
AHELAAAKVPVSAAQGPPGPGLSHVPFTLVPWAGLATFGSWTLPQSHSGYTAVADAALSLLVETGGCCWAVSVTFNCRGHPFSLYVTSQQEEGKATLCLWRSHGSHIPAALEAFCVDMGRSLPIS

SEQ ID NO: 3015 - protein, 9 aa, synthetic construct
  REGION 1..9: note = ATaRI peptide
SLKGLLLNR

SEQ ID NO: 3016 - protein, 27 aa, synthetic construct
  REGION 1..27: note = ATaRI peptide
KGGKAYAKVSRCSFNCFGTCNVAYCYL

SEQ ID NO: 3017 - protein, 9 aa, synthetic construct
  REGION 1..9: note = ATaRI peptide
FGSHHLPNR

SEQ ID NO: 3018 - protein, 9 aa, synthetic construct
  REGION 1..9: note = ATaRI peptide
ENPGVRYKR

SEQ ID NO: 3019 - protein, 26 aa, synthetic construct
  REGION 1..26: note = ATaRI peptide
IDEKSLIKVMYARQVMTMHKVCLISL

SEQ ID NO: 3020 - protein, 18 aa, synthetic construct
  REGION 1..18: note = ATaRI peptide
HFRKQITKVSSIVYEIPD

SEQ ID NO: 3021 - protein, 28 aa, synthetic construct
  REGION 1..28: note = ATaRI peptide
LGVPIVPQVRSLMLCIYFICMCMYGCMY

SEQ ID NO: 3022 - protein, 18 aa, synthetic construct
  REGION 1..18: note = ATaRI peptide
PFIKDIMEVKIIKMFFST

SEQ ID NO: 3023 - protein, 60 aa, synthetic construct
  REGION 1..60: note = ATaRI peptide
HKSCEVIIGKTFIFFFSVFFFFFETKSRSCPPGWSGMAQSWLTATSASQVQAILLPQPPE

SEQ ID NO: 3024 - protein, 17 aa, synthetic construct
  REGION 1..17: note = ATaRI peptide
KTIGEKMKVRELNNKQP

SEQ ID NO: 3025 - protein, 63 aa, synthetic construct
  REGION 1..63: note = ATaRI peptide
SVPISNDEVGGCAAAGGCLRSLLSLQGRGREEICGTLALSVRSRFFVYSLCPPIENCRSQILV

SEQ ID NO: 3026 - protein, 27 aa, synthetic construct
  REGION 1..27: note = ATaRI peptide
FRVHQFEKVSRWVRVRSGTFSVSRMVR

SEQ ID NO: 3027 - protein, 41 aa, synthetic construct
  REGION 1..41: note = ATaRI peptide
HLQSLQRLVSVWPCCILPSPHWGNEGRSQGAGQREQLQAGK

SEQ ID NO: 3028 - protein, 74 aa, synthetic construct
  REGION 1..74: note = ATaRI peptide
EFVDQEQLVSDGFLQNPCTSLHATPRVGCVGEHESGRMPTAGKGESVRIHGCSTLGCQDPGLKSPAIPFSWPDT

SEQ ID NO: 3029 - protein, 9 aa, synthetic construct
  REGION 1..9: note = ATaRI peptide
EESVTGVHR

SEQ ID NO: 3030 - protein, 27 aa, synthetic construct
  REGION 1..27: note = ATaRI peptide
VVVCGYGEVNSWVSVSLSFCVLIRNIG

SEQ ID NO: 3031 - protein, 30 aa, synthetic construct
  REGION 1..30: note = ATaRI peptide
LSITATTQVCGKMPAYTALQFVELGVDQFQ

SEQ ID NO: 3032 - protein, 9 aa, synthetic construct
  REGION 1..9: note = ATaRI peptide
GLPWAPKVR

SEQ ID NO: 3033 - protein, 35 aa, synthetic construct
  REGION 1..35: note = ATaRI peptide
YLRSPLSGVSWRSSVRARWLTPVIPALWEAEEGRS

SEQ ID NO: 3034 - protein, 13 aa, synthetic construct
  REGION 1..13: note = ATaRI peptide
KIEGYEDQVIIAF

SEQ ID NO: 3035 - protein, 9 aa, synthetic construct
  REGION 1..9: note = ATaRI peptide
IEEGERPDR

SEQ ID NO: 3036 - protein, 9 aa, synthetic construct
  REGION 1..9: note = ATaRI peptide
APKEIAEIK

SEQ ID NO: 3037 - protein, 9 aa, synthetic construct
  REGION 1..9: note = ATaRI peptide
LESQTLQEV

SEQ ID NO: 3038 - protein, 9 aa, synthetic construct
  REGION 1..9: note = ATaRI peptide
FGLNNMEEL

SEQ ID NO: 3039 - protein, 41 aa, synthetic construct
  REGION 1..41: note = ATaRI peptide
QKAKLTVNGKELCSLIFFSLEGFFMFSFESLERIRLNLTFK

SEQ ID NO: 3040 - protein, 29 aa, synthetic construct
  REGION 1..29: note = ATaRI peptide
ANASLTVLGTFTAPWVPAFVGVFGSYSWS

SEQ ID NO: 3041 - protein, 23 aa, synthetic construct
  REGION 1..23: note = ATaRI peptide
GYIHKGTDGNDSVVYGYNFSLFY

SEQ ID NO: 3042 - protein, 9 aa, synthetic construct
  REGION 1..9: note = ATaRI peptide
PQYGTYYVE

SEQ ID NO: 3043 - protein, 28 aa, synthetic construct
  REGION 1..28: note = ATaRI peptide
VEIGSSKPGKHSFQSFLLRITCEICMLS

SEQ ID NO: 3044 - protein, 16 aa, synthetic construct
  REGION 1..16: note = ATaRI peptide
AQDGKIAPGKKFFIII

SEQ ID NO: 3045 - protein, 31 aa, synthetic construct
  REGION 1..31: note = ATaRI peptide
AIKDGRIHVSWFLSVTLGSGSRLETSKDINN

SEQ ID NO: 3046 - protein, 27 aa, synthetic construct
  REGION 1..27: note = ATaRI peptide
GYPLWRLKVCLPYYASDSCTPPLTPQF

SEQ ID NO: 3047 - protein, 21 aa, synthetic construct
  REGION 1..21: note = ATaRI peptide
NCLDDMAQVSTESFRKSDIYF

SEQ ID NO: 3048 - protein, 12 aa, synthetic construct
  REGION 1..12: note = ATaRI peptide
QLNTVHNQVFNK

SEQ ID NO: 3049 - protein, 23 aa, synthetic construct
  REGION 1..23: note = ATaRI peptide
IQSGVLTQVKARAMWILSIAKHY

SEQ ID NO: 3050 - protein, 10 aa, synthetic construct
  REGION 1..10: note = ATaRI peptide
IRKNLTDKGM

SEQ ID NO: 3051 - protein, 15 aa, synthetic construct
  REGION 1..15: note = ATaRI peptide
STRTEEVQVRIKGGL

SEQ ID NO: 3052 - protein, 62 aa, synthetic construct
  REGION 1..62: note = ATaRI peptide
GLKVYNVDGMCLERVSVVLTGAQLGDYLRFMVRLVRLLLWAYLYGTFLFQNNFSFLCRQTHV

SEQ ID NO: 3053 - protein, 66 aa, synthetic construct
  REGION 1..66: note = ATaRI peptide
ITNGMTPKVRCSGRALPPSSWLVTELGQLNYSVLLEVIKSKGISKTQVIRISDSHLFYVMLVQLFF

SEQ ID NO: 3054 - protein, 24 aa, synthetic construct
  REGION 1..24: note = ATaRI peptide
SVEPVSCPGAWRASLHKHSLPGPQ

SEQ ID NO: 3055 - protein, 33 aa, synthetic construct
  REGION 1..33: note = ATaRI peptide
KKQRSRRNGKLPLFCPTAGPSKIPMKQLMGMTP

SEQ ID NO: 3056 - protein, 17 aa, synthetic construct
  REGION 1..17: note = ATaRI peptide
ATVVIQPSGELETMRYR

SEQ ID NO: 3057 - protein, 11 aa, synthetic construct
  REGION 1..11: note = ATaRI peptide
IEIDFQTSGEQ

SEQ ID NO: 3058 - protein, 16 aa, synthetic construct
  REGION 1..16: note = ATaRI peptide
AEDPAGLKVSQGRLLV

SEQ ID NO: 3059 - protein, 50 aa, synthetic construct
  REGION 1..50: note = ATaRI peptide
ALTWLSKDGRQKCLNSLPFPTSFEPPKRGTSSAKKGHLWSYLITLLENQY

SEQ ID NO: 3060 - protein, 9 aa, synthetic construct
  REGION 1..9: note = ATaRI peptide
PNRDSRARV

SEQ ID NO: 3061 - protein, 9 aa, synthetic construct
  REGION 1..9: note = ATaRI peptide
QQKDVVIHR

SEQ ID NO: 3062 - protein, 19 aa, synthetic construct
  REGION 1..19: note = ATaRI peptide
CHESYDRTGKNINKANYIV

SEQ ID NO: 3063 - protein, 48 aa, synthetic construct
  REGION 1..48: note = ATaRI peptide
QWGWEAALVNKPIFHFICKSVNSCPPMMPHTLTHVTSFLVSVGQFLFI

SEQ ID NO: 3064 - protein, 11 aa, synthetic construct
  REGION 1..11: note = ATaRI peptide
GRLASGSKVSL

SEQ ID NO: 3065 - protein, 49 aa, synthetic construct
  REGION 1..49: note = ATaRI peptide
TMVGHRTEVSVGSWAQGNNGKAKGKRWWSSLPLSWLFVFSAHSNYHMPS

SEQ ID NO: 3066 - protein, 12 aa, synthetic construct
  REGION 1..12: note = ATaRI peptide
ADSIKIWNRFVK

SEQ ID NO: 3067 - protein, 35 aa, synthetic construct
  REGION 1..35: note = ATaRI peptide
SMSLSPDQVTKPDFKALEFSPVATLISLRVSLKKA

SEQ ID NO: 3068 - protein, 21 aa, synthetic construct
  REGION 1..21: note = ATaRI peptide
ASLLVLIEVRWFGFTCSLRRF

SEQ ID NO: 3069 - protein, 28 aa, synthetic construct
  REGION 1..28: note = ATaRI peptide
GVLFSVAGGKKGPTCILQILKGQRRQEA

SEQ ID NO: 3070 - protein, 21 aa, synthetic construct
  REGION 1..21: note = ATaRI peptide
VVGAGLPQVRWAERVWASGQA

SEQ ID NO: 3071 - protein, 85 aa, synthetic construct
  REGION 1..85: note = ATaRI peptide
NQGLTWKVVRRTFSESINHTPRITLGVPYSVHGMVVLMRLGGQLDQKQLSSCAHNLHTGLSVLLISIPSLTPNQTAVTFFFFFFF

SEQ ID NO: 3072 - protein, 23 aa, synthetic construct
  REGION 1..23: note = ATaRI peptide
VHPKPKLVRYLHSRLPPEPAAAP

SEQ ID NO: 3073 - protein, 9 aa, synthetic construct
  REGION 1..9: note = ATaRI peptide
WETEVEMDK

SEQ ID NO: 3074 - protein, 13 aa, synthetic construct
  REGION 1..13: note = ATaRI peptide
ISNNIKFKVKKTA

SEQ ID NO: 3075 - protein, 51 aa, synthetic construct
  REGION 1..51: note = ATaRI peptide
VCYSESQSVSLSEAEISQARPDEARGVGRCRRAVNSAIGKAECKARSAEWT

SEQ ID NO: 3076 - protein, 47 aa, synthetic construct
  REGION 1..47: note = ATaRI peptide
QDALNILPGSLYFPCVSYLCLGYGRSILRTGCIYTYCYCFSQKLGWS

SEQ ID NO: 3077 - protein, 9 aa, synthetic construct
  REGION 1..9: note = ATaRI peptide
EDQGPPCPR

SEQ ID NO: 3078 - protein, 9 aa, synthetic construct
  REGION 1..9: note = ATaRI peptide
EDQNPPCPR

SEQ ID NO: 3079 - protein, 20 aa, synthetic construct
  REGION 1..20: note = ATaRI peptide
VGFSLDVGGEYLSMKVIRIH

SEQ ID NO: 3080 - protein, 9 aa, synthetic construct
  REGION 1..9: note = ATaRI peptide
EDQNPPCPR

SEQ ID NO: 3081 - protein, 26 aa, synthetic construct
  REGION 1..26: note = ATaRI peptide
TRIVENIEVSPADFYKSINVKGISQV

SEQ ID NO: 3082 - protein, 37 aa, synthetic construct
  REGION 1..37: note = ATaRI peptide
GLLSTDDKVSGLWSCVSCLIQKIRMFSQRLKKMGSVK

SEQ ID NO: 3083 - protein, 14 aa, synthetic construct
  REGION 1..14: note = ATaRI peptide
PLLVFPNPVCTTVG

SEQ ID NO: 3084 - protein, 36 aa, synthetic construct
  REGION 1..36: note = ATaRI peptide
FESLHRGQGEEHQSFVLFCLMIENPAHGVLCVKQQQ

SEQ ID NO: 3085 - protein, 19 aa, synthetic construct
  REGION 1..19: note = ATaRI peptide
VNTKLDLKVSSVPFGSLKL

SEQ ID NO: 3086 - protein, 32 aa, synthetic construct
  REGION 1..32: note = ATaRI peptide
LVAHLEMIGKWWGVEGSKLAKSGQHLNIVITN

SEQ ID NO: 3087 - protein, 9 aa, synthetic construct
  REGION 1..9: note = ATaRI peptide
EALIFQTFK

SEQ ID NO: 3088 - protein, 24 aa, synthetic construct
  REGION 1..24: note = ATaRI peptide
RAAIEGQTVGSLGPPSCFSSLTDQ

SEQ ID NO: 3089 - protein, 48 aa, synthetic construct
  REGION 1..48: note = ATaRI peptide
VGQESSSPGKRGEKQHNTEGGEIHRTVEETEGGGHCVQANVNEEIAFL

SEQ ID NO: 3090 - protein, 9 aa, synthetic construct
  REGION 1..9: note = ATaRI peptide
SIQIELHFR

SEQ ID NO: 3091 - protein, 14 aa, synthetic construct
  REGION 1..14: note = ATaRI peptide
LEVKVNVTGDYMWV

SEQ ID NO: 3092 - protein, 75 aa, synthetic construct
  REGION 1..75: note = ATaRI peptide
SGSLFGIEVRSLCVDHSTACWLTSKASGREFSLLNFHEGKELMKLEDPCPLFLFVFSPNLPGYSNAWIQSPSVSL

SEQ ID NO: 3093 - protein, 54 aa, synthetic construct
  REGION 1..54: note = ATaRI peptide
NIIHPQVYVSMIFLLSLCLLRIYTAPESCGYTFLNDQRNFMTYMRLKFISALFY

SEQ ID NO: 3094 - protein, 14 aa, synthetic construct
  REGION 1..14: note = ATaRI peptide
DTSQNIELGKNVVR

SEQ ID NO: 3095 - protein, 9 aa, synthetic construct
  REGION 1..9: note = ATaRI peptide
IAATYTFSG

SEQ ID NO: 3096 - protein, 12 aa, synthetic construct
  REGION 1..12: note = ATaRI peptide
GLHGLVVQVSRF

SEQ ID NO: 3097 - protein, 15 aa, synthetic construct
  REGION 1..15: note = ATaRI peptide
DGPTRALQVIICHKS

SEQ ID NO: 3098 - protein, 34 aa, synthetic construct
  REGION 1..34: note = ATaRI peptide
FGYDQAESGNVECSMSVFGNWSKDGIFESVCKNR

SEQ ID NO: 3099 - protein, 22 aa, synthetic construct
  REGION 1..22: note = ATaRI peptide
SHLGACLPGIHSVLVPSWEVLL

SEQ ID NO: 3100 - protein, 68 aa, synthetic construct
  REGION 1..68: note = ATaRI peptide
LWKLVLLQSECGALGGGWGVARGAVRVRFGQNRPSELGPGGVGRSHQGRGRVWGRSGEPLARGCDVFS

SEQ ID NO: 3101 - protein, 26 aa, synthetic construct
  REGION 1..26: note = ATaRI peptide
SAVDKTRIGECSSCHGASQAVKSRWQ

SEQ ID NO: 3102 - protein, 17 aa, synthetic construct
  REGION 1..17: note = ATaRI peptide
AIYYKTLKVTALELIYC

SEQ ID NO: 3103 - protein, 18 aa, synthetic construct
  REGION 1..18: note = ATaRI peptide
YCVWKIFMVSMLFLIIRV

SEQ ID NO: 3104 - protein, 12 aa, synthetic construct
  REGION 1..12: note = ATaRI peptide
LVPKLSLIGKEF

SEQ ID NO: 3105 - protein, 9 aa, synthetic construct
  REGION 1..9: note = ATaRI peptide
TLESVVQER

SEQ ID NO: 3106 - protein, 9 aa, synthetic construct
  REGION 1..9: note = ATaRI peptide
ETLKRNVNK

SEQ ID NO: 3107 - protein, 33 aa, synthetic construct
  REGION 1..33: note = ATaRI peptide
HLVQKLSPGKVAIGPDDPKPQAYERLQTSILSQ

SEQ ID NO: 3108 - protein, 9 aa, synthetic construct
  REGION 1..9: note = ATaRI peptide
EDQGPPCPR

SEQ ID NO: 3109 - protein, 111 aa, synthetic construct
  REGION 1..111: note = ATaRI peptide
SSIMITSQVSHRLPPRHPSASLHRIALSGPPRCGLVRGLAPLLRGLRQSLWHTERVCDLLRPVPSAPAVRRLACGRPRPHPASIPGISVHFWKRSADLQAKSRRRQLRRRF

SEQ ID NO: 3110 - protein, 9 aa, synthetic construct
  REGION 1..9: note = ATaRI peptide
DMIISKKKR

SEQ ID NO: 3111 - protein, 64 aa, synthetic construct
  REGION 1..64: note = ATaRI peptide
AFLRKRATVSVTKPLSGHRRVVGWARLSSWARLQPLSWLAVAQSWLAATSASWVQAALLPQPPE

SEQ ID NO: 3112 - protein, 27 aa, synthetic construct
  REGION 1..27: note = ATaRI peptide
STREQESQVRINAQIRQVSCSAFIVCK

SEQ ID NO: 3113 - protein, 9 aa, synthetic construct
  REGION 1..9: note = ATaRI peptide
VKFHAHPER

SEQ ID NO: 3114 - protein, 9 aa, synthetic construct
  REGION 1..9: note = ATaRI peptide
GFSSVSHIR

SEQ ID NO: 3115 - protein, 61 aa, synthetic construct
  REGION 1..61: note = ATaRI peptide
KEANQAHSGMQQPMGQKLHLLFLCCLFDFSSTTEVWTVRGLNASKPRQNRETILIFQLCLI

SEQ ID NO: 3116 - protein, 36 aa, synthetic construct
  REGION 1..36: note = ATaRI peptide
MLQKQLGESEHFCICVLAIGSPTLCCSAWLGLDGRV

SEQ ID NO: 3117 - protein, 47 aa, synthetic construct
  REGION 1..47: note = ATaRI peptide
IPVLPGKVVRCQCPFLVQTQFSCPPILFCLLNVTAFPENQEPHSELG

SEQ ID NO: 3118 - protein, 17 aa, synthetic construct
  REGION 1..17: note = ATaRI peptide
LPKCWDYSVSHCTRPSK

SEQ ID NO: 3119 - protein, 21 aa, synthetic construct
  REGION 1..21: note = ATaRI peptide
IAQRLRTKVSGLEYNTEFGKS

SEQ ID NO: 3120 - protein, 17 aa, synthetic construct
  REGION 1..17: note = ATaRI peptide
LMPPPEPKGAFLSGLFC

SEQ ID NO: 3121 - protein, 15 aa, synthetic construct
  REGION 1..15: note = ATaRI peptide
NKQWKKSQSKEQNLN

SEQ ID NO: 3122 - protein, 16 aa, synthetic construct
  REGION 1..16: note = ATaRI peptide
SKIVAEFRVSYRICLI

SEQ ID NO: 3123 - protein, 16 aa, synthetic construct
  REGION 1..16: note = ATaRI peptide
TETLKCLKGNAYILLE

SEQ ID NO: 3124 - protein, 14 aa, synthetic construct
  REGION 1..14: note = ATaRI peptide
EDDGSKIIGMSLCD

SEQ ID NO: 3125 - protein, 16 aa, synthetic construct
  REGION 1..16: note = ATaRI peptide
IGGLKLLSVSCGTELG

SEQ ID NO: 3126 - protein, 28 aa, synthetic construct
  REGION 1..28: note = ATaRI peptide
PPHPADRQGESCPGLAPPRLRGASQEAI

SEQ ID NO: 3127 - protein, 16 aa, synthetic construct
  REGION 1..16: note = ATaRI peptide
NLHNPIVQVGVPSLAT

SEQ ID NO: 3128 - protein, 9 aa, synthetic construct
  REGION 1..9: note = ATaRI peptide
SSSQDLHKG

SEQ ID NO: 3129 - protein, 15 aa, synthetic construct
  REGION 1..15: note = ATaRI peptide
TPNVKNKLRYLDRGL

SEQ ID NO: 3130 - protein, 16 aa, synthetic construct
  REGION 1..16: note = ATaRI peptide
ELYPICRPRECFSLIP

SEQ ID NO: 3131 - protein, 10 aa, synthetic construct
  REGION 1..10: note = ATaRI peptide
GSFVCIYAGW

SEQ ID NO: 3132 - protein, 12 aa, synthetic construct
  REGION 1..12: note = ATaRI peptide
QKAKFDVSGMKC

SEQ ID NO: 3133 - protein, 39 aa, synthetic construct
  REGION 1..39: note = ATaRI peptide
LPRVLELQVWATMPSQESFSYSLLYHLLSFSYVRGSIIY

SEQ ID NO: 3134 - protein, 12 aa, synthetic construct
  REGION 1..12: note = ATaRI peptide
HIVELLVRVKQE

SEQ ID NO: 3135 - protein, 55 aa, synthetic construct
  REGION 1..55: note = ATaRI peptide
AEILVILQVWFFLYSPECMLIEVKDFFVGAESKLNFPYFIKVALLICLNLVTQCH

SEQ ID NO: 3136 - protein, 10 aa, synthetic construct
  REGION 1..10: note = ATaRI peptide
LSNSHRATGR

SEQ ID NO: 3137 - protein, 27 aa, synthetic construct
  REGION 1..27: note = ATaRI peptide
KTLQRDCLVSLLLRHQKSQLLKQLDCS

SEQ ID NO: 3138 - protein, 38 aa, synthetic construct
  REGION 1..38: note = ATaRI peptide
VAESEFTHVSIWDVWEVNVLQGIKRITDGLEQEVNCQD

SEQ ID NO: 3139 - protein, 19 aa, synthetic construct
  REGION 1..19: note = ATaRI peptide
ALYSSPPEVGNRGHHGGSA

SEQ ID NO: 3140 - protein, 9 aa, synthetic construct
  REGION 1..9: note = ATaRI peptide
ADCQAEREK

SEQ ID NO: 3141 - protein, 42 aa, synthetic construct
  REGION 1..42: note = ATaRI peptide
DWDKVTATVNILIKQGWQVAEGQHVGASWSPRSCPCRLCTAL

SEQ ID NO: 3142 - protein, 134 aa, synthetic construct
  REGION 1..134: note = ATaRI peptide
ASRPGGRQVRPDCPLPSPDRGWARTHAHTCSHLSVVKRLSSTGFIVPCSPMTPLSKRFIILQITLDFSTRASQIAWYKWITGKPRFFKNFITIDFYTMEYYSAIKRNKILSFGPGAVAHSCNSRTLGGRGRWIT

SEQ ID NO: 3143 - protein, 9 aa, synthetic construct
  REGION 1..9: note = ATaRI peptide
LKPATEGKQ

SEQ ID NO: 3144 - protein, 29 aa, synthetic construct
  REGION 1..29: note = ATaRI peptide
KVLQLQKGRWVQTLFSTSGGSAPGSLPGA

SEQ ID NO: 3145 - protein, 9 aa, synthetic construct
  REGION 1..9: note = ATaRI peptide
VLPEEITEE

SEQ ID NO: 3146 - protein, 34 aa, synthetic construct
  REGION 1..34: note = ATaRI peptide
LTPSIYTEVSACIRICAGGLTGTHLSEHSEYTQP

SEQ ID NO: 3147 - protein, 13 aa, synthetic construct
  REGION 1..13: note = ATaRI peptide
VAVIDSAQVNIEL

SEQ ID NO: 3148 - protein, 18 aa, synthetic construct
  REGION 1..18: note = ATaRI peptide
DFEEKVKQVSVSLIYCTL

SEQ ID NO: 3149 - protein, 10 aa, synthetic construct
  REGION 1..10: note = ATaRI peptide
GALSKPAVGQ

SEQ ID NO: 3150 - protein, 18 aa, synthetic construct
  REGION 1..18: note = ATaRI peptide
QSPSLVQYGEKMESDLNL

SEQ ID NO: 3151 - protein, 20 aa, synthetic construct
  REGION 1..20: note = ATaRI peptide
GSVYSKTQVGAWLWIKVEKR

SEQ ID NO: 3152 - protein, 39 aa, synthetic construct
  REGION 1..39: note = ATaRI peptide
ALQQPQNIGSLFQSSQQLPKIRVIGCQVLSEETEAQEGE

SEQ ID NO: 3153 - protein, 23 aa, synthetic construct
  REGION 1..23: note = ATaRI peptide
GTVHLLVDGELCLRGPGDSSRKK

SEQ ID NO: 3154 - protein, 14 aa, synthetic construct
  REGION 1..14: note = ATaRI peptide
IQISKAYEVSCPAL

SEQ ID NO: 3155 - protein, 17 aa, synthetic construct
  REGION 1..17: note = ATaRI peptide
LPGNLVEKVSICQGNYG

SEQ ID NO: 3156 - protein, 14 aa, synthetic construct
  REGION 1..14: note = ATaRI peptide
PIVPLLYKVLSMLG

SEQ ID NO: 3157 - protein, 35 aa, synthetic construct
  REGION 1..35: note = ATaRI peptide
GIPAAESQVRRAASRACPGAKPSPPRGLTPSLCYW

SEQ ID NO: 3158 - protein, 25 aa, synthetic construct
  REGION 1..25: note = ATaRI peptide
DVIRTRVQVRLTTSLTLLLEKPLEA

SEQ ID NO: 3159 - protein, 17 aa, synthetic construct
  REGION 1..17: note = ATaRI peptide
EALLSGDLGKLINLEGY

SEQ ID NO: 3160 - protein, 12 aa, synthetic construct
  REGION 1..12: note = ATaRI peptide
QITYLIHQVRDS

SEQ ID NO: 3161 - protein, 10 aa, synthetic construct
  REGION 1..10: note = ATaRI peptide
HVATNLGRSE

SEQ ID NO: 3162 - protein, 9 aa, synthetic construct
  REGION 1..9: note = ATaRI peptide
GLLHKYYVK

SEQ ID NO: 3163 - protein, 75 aa, synthetic construct
  REGION 1..75: note = ATaRI peptide
LGMGQGLKGECLATQRPNCPIFSAIPHFQHRFLDSPSLSSLTTLLCATASPLSLLLSSISTAFPPCSSTFPPTED

SEQ ID NO: 3164 - protein, 41 aa, synthetic construct
  REGION 1..41: note = ATaRI peptide
QEGAVASTVSSSQLPQLLLGLAQLTSPFPQGFHHRLRSTQT

SEQ ID NO: 3165 - protein, 78 aa, synthetic construct
  REGION 1..78: note = ATaRI peptide
WTKKDSNMVRLLLPVLFFFFFFFFETESRSVAQAGVQWRDLGSLQAPPPGFTPFSCLSLPSSWDYRRPLPRPANFLYF

SEQ ID NO: 3166 - protein, 72 aa, synthetic construct
  REGION 1..72: note = ATaRI peptide
STPPPDRIVSGGPACGQPALPASLPRPSLLSLLLVLLLQLPCPVSILESSAFCPSVPLPAQIPPPPLLVMCP

SEQ ID NO: 3167 - protein, 11 aa, synthetic construct
  REGION 1..11: note = ATaRI peptide
AIIQLEERGDW

SEQ ID NO: 3168 - protein, 12 aa, synthetic construct
  REGION 1..12: note = ATaRI peptide
VVFPHLEKVGMS

SEQ ID NO: 3169 - protein, 41 aa, synthetic construct
  REGION 1..41: note = ATaRI peptide
PSNTSFTPVHSSWSSSPFFFNPVTVHSTVTIVTLMHNSSYY

SEQ ID NO: 3170 - protein, 54 aa, synthetic construct
  REGION 1..54: note = ATaRI peptide
AEATPGAQVSFRKRSRLQVPQRKLCYGSSTQSLQQAVISSCFPSSFRFTKLYDN

SEQ ID NO: 3171 - protein, 32 aa, synthetic construct
  REGION 1..32: note = ATaRI peptide
PPNSSSTEVHSSWSHFALFFSTQSKGLISPVT

SEQ ID NO: 3172 - protein, 24 aa, synthetic construct
  REGION 1..24: note = ATaRI peptide
QNLPVRSTGKILCECPFLCATTEE

SEQ ID NO: 3173 - protein, 55 aa, synthetic construct
  REGION 1..55: note = ATaRI peptide
CRYGPVVKVGGRFWYVVQTSDSLVLVFSPFSLSWLALPISLITSTLKLCLLRFGQ

SEQ ID NO: 3174 - protein, 58 aa, synthetic construct
  REGION 1..58: note = ATaRI peptide
KIGGNKIKVCRMTLNRSKTKSYSNLTLLGWAWWLTPVIPALWEAKAGGSPEVRSSRPA

SEQ ID NO: 3175 - protein, 14 aa, synthetic construct
  REGION 1..14: note = ATaRI peptide
CGVCFSGKVSGAGR

SEQ ID NO: 3176 - protein, 19 aa, synthetic construct
  REGION 1..19: note = ATaRI peptide
NETKVIKQVMTLPAPSNSS

SEQ ID NO: 3177 - protein, 9 aa, synthetic construct
  REGION 1..9: note = ATaRI peptide
DHSGAFHNK

SEQ ID NO: 3178 - protein, 34 aa, synthetic construct
  REGION 1..34: note = ATaRI peptide
QLDEVVSEVSVSNTAESRWAKVSSGLINRETFTF

SEQ ID NO: 3179 - protein, 71 aa, synthetic construct
  REGION 1..71: note = ATaRI peptide
TVRSQEWKVNFTSALLWGPYFQLKSIQFMMIFFFLLRWSFTLSPRLECSGAISAHCNLHLPVSTNSPASAS

SEQ ID NO: 3180 - protein, 9 aa, synthetic construct
  REGION 1..9: note = ATaRI peptide
YGNKCIIPW

SEQ ID NO: 3181 - protein, 37 aa, synthetic construct
  REGION 1..37: note = ATaRI peptide
KGADCGAKVMPFSTMVRLLMVLLCHIRIPEVKPSLLG

SEQ ID NO: 3182 - protein, 44 aa, synthetic construct
  REGION 1..44: note = ATaRI peptide
PLISYAGEVSLLYFFLYSFTKLCIFQNNEKVDFKCSHHKERISI

SEQ ID NO: 3183 - protein, 53 aa, synthetic construct
  REGION 1..53: note = ATaRI peptide
SAKAQVNPGNMAITQLYARRPAECLNPSMFNGGSKSCQEGLQSSFFLNLHGEI

SEQ ID NO: 3184 - protein, 57 aa, synthetic construct
  REGION 1..57: note = ATaRI peptide
FSEITFQSGRELRSSLGSGSKVMKEECTCPELLISRSLRGVGLYRQLLIDGYGESFV

SEQ ID NO: 3185 - protein, 44 aa, synthetic construct
  REGION 1..44: note = ATaRI peptide
RADANKNARSVVYILNFPLGISSLGPGILLDTSEQFFLLRWEGQ

SEQ ID NO: 3186 - protein, 14 aa, synthetic construct
  REGION 1..14: note = ATaRI peptide
YVICVEDHVCISGS

SEQ ID NO: 3187 - protein, 73 aa, synthetic construct
  REGION 1..73: note = ATaRI peptide
TELEKYEQVTRTTWGSAPRPFRKGWRKHNPGACREERLTFPRCWHPCARHPLPSHRALAKLESAKSWSQLLKT

SEQ ID NO: 3188 - protein, 9 aa, synthetic construct
  REGION 1..9: note = ATaRI peptide
LRSRFLDAR

SEQ ID NO: 3189 - protein, 83 aa, synthetic construct
  REGION 1..83: note = ATaRI peptide
KCGITVSQVSSTSKASACSLAMAGPPGQALRGLALLDIHALQVPSAIALKYQGKHLMCMRISEFLGKYLAKLEKNQQKEEKNK

SEQ ID NO: 3190 - protein, 68 aa, synthetic construct
  REGION 1..68: note = ATaRI peptide
VGANVQSQVGTQPICHQVNALESKSPQLYWTSCFCPERERKTDQNQNLTNDRTKIKTTIVMGNLVHTL

SEQ ID NO: 3191 - protein, 33 aa, synthetic construct
  REGION 1..33: note = ATaRI peptide
IPRGADNLGESLQSVILEYNVCPLSVIIWGRMW

SEQ ID NO: 3192 - protein, 9 aa, synthetic construct
  REGION 1..9: note = ATaRI peptide
YESALRADG

SEQ ID NO: 3193 - protein, 20 aa, synthetic construct
  REGION 1..20: note = ATaRI peptide
NYETVLSLGKAVFSFVSWKL

SEQ ID NO: 3194 - protein, 9 aa, synthetic construct
  REGION 1..9: note = ATaRI peptide
VAYNNLIER

SEQ ID NO: 3195 - protein, 49 aa, synthetic construct
  REGION 1..49: note = ATaRI peptide
SAVVYAVEVGLLLAEIILQVECDRLVCCLKSVLQEKNPNVTLISQNCHC

SEQ ID NO: 3196 - protein, 22 aa, synthetic construct
  REGION 1..22: note = ATaRI peptide
ALEKSFLEVSEDFTFLYMGLSV

SEQ ID NO: 3197 - protein, 20 aa, synthetic construct
  REGION 1..20: note = ATaRI peptide
IFPSPTSLVRIKNRECKLKG

SEQ ID NO: 3198 - protein, 16 aa, synthetic construct
  REGION 1..16: note = ATaRI peptide
CTKEDCKDVRIKFLYK

SEQ ID NO: 3199 - protein, 17 aa, synthetic construct
  REGION 1..17: note = ATaRI peptide
RMLGTRATGKKIILEKI

SEQ ID NO: 3200 - protein, 22 aa, synthetic construct
  REGION 1..22: note = ATaRI peptide
PESERERDGNYTLVSFSLYMVF

SEQ ID NO: 3201 - protein, 48 aa, synthetic construct
  REGION 1..48: note = ATaRI peptide
PPEGDSETSKVLFCFCCYKIAALDVYLLSCSLRCCILFLVFNKLLLLL

SEQ ID NO: 3202 - protein, 33 aa, synthetic construct
  REGION 1..33: note = ATaRI peptide
LQPHPFDPSKISFLGRGLEIICMTHQSYKIILF

SEQ ID NO: 3203 - protein, 16 aa, synthetic construct
  REGION 1..16: note = ATaRI peptide
FNRKLADEVRFLLYLL

SEQ ID NO: 3204 - protein, 13 aa, synthetic construct
  REGION 1..13: note = ATaRI peptide
NDTRLYHEVFIVV

SEQ ID NO: 3205 - protein, 13 aa, synthetic construct
  REGION 1..13: note = ATaRI peptide
LIATIMVLVRSAF

SEQ ID NO: 3206 - protein, 35 aa, synthetic construct
  REGION 1..35: note = ATaRI peptide
NLSQPESPGATPIRSPPQTPPTFYLFSCPFPEQSP

SEQ ID NO: 3207 - protein, 27 aa, synthetic construct
  REGION 1..27: note = ATaRI peptide
WRSKFLASRYFLQQIVFHFLVFAPSGF

SEQ ID NO: 3208 - protein, 28 aa, synthetic construct
  REGION 1..28: note = ATaRI peptide
RQEMIATQKYGTCLHSELFCFLLQIKLL

SEQ ID NO: 3209 - protein, 47 aa, synthetic construct
  REGION 1..47: note = ATaRI peptide
EVAEALTKVGPCLLHNHKPTSDPQPQALSLWHRLVPVSGRPLSLVTD

SEQ ID NO: 3210 - protein, 69 aa, synthetic construct
  REGION 1..69: note = ATaRI peptide
GQEPDREGGTRGGRGAREGRATGLRVGSGGREDREKRSSHSRQRFLILPVGGRLRALLCVHDFLFSSAL

SEQ ID NO: 3211 - protein, 26 aa, synthetic construct
  REGION 1..26: note = ATaRI peptide
ELQELRRQVLSLCHPLAWGLLCAPGQ

SEQ ID NO: 3212 - protein, 51 aa, synthetic construct
  REGION 1..51: note = ATaRI peptide
PARDAPAEGKGSAARREGGRWAGRTEAPPPHGRVFLFLFLFFFKEPTTPLH

SEQ ID NO: 3213 - protein, 12 aa, synthetic construct
  REGION 1..12: note = ATaRI peptide
ESELRASQVGRS

SEQ ID NO: 3214 - protein, 16 aa, synthetic construct
  REGION 1..16: note = ATaRI peptide
QMTQSDAQVKFGLIAF

SEQ ID NO: 3215 - protein, 83 aa, synthetic construct
  REGION 1..83: note = ATaRI peptide
FFMAPPHQARKDIIFVTVCEAAQSWIQTPLIAFFFPFLKIYLIIFFETESRSVTQAGFTVARSQLTAASTSWAQAILPPQPPE

SEQ ID NO: 3216 - protein, 10 aa, synthetic construct
  REGION 1..10: note = ATaRI peptide
TLGELESLVR

SEQ ID NO: 3217 - protein, 33 aa, synthetic construct
  REGION 1..33: note = ATaRI peptide
LDPKLILQVRIMTRLILCLLRRLLKLLSCKITF

SEQ ID NO: 3218 - protein, 12 aa, synthetic construct
  REGION 1..12: note = ATaRI peptide
KNTDLSLEGKNY

SEQ ID NO: 3219 - protein, 10 aa, synthetic construct
  REGION 1..10: note = ATaRI peptide
ASIPPEEMVR

SEQ ID NO: 3220 - protein, 27 aa, synthetic construct
  REGION 1..27: note = ATaRI peptide
LLKYIQFKVRYFGLWKMNRWGLAYSAI

SEQ ID NO: 3221 - protein, 12 aa, synthetic construct
  REGION 1..12: note = ATaRI peptide
ELSRTAAQVHHL

SEQ ID NO: 3222 - protein, 29 aa, synthetic construct
  REGION 1..29: note = ATaRI peptide
RWVTRVFKGTMTLLKVLSLDRKIGALPFS

SEQ ID NO: 3223 - protein, 9 aa, synthetic construct
  REGION 1..9: note = ATaRI peptide
KQEQHEEEK

SEQ ID NO: 3224 - protein, 18 aa, synthetic construct
  REGION 1..18: note = ATaRI peptide
NKQGGQGDGKWTLVGEAA

SEQ ID NO: 3225 - protein, 9 aa, synthetic construct
  REGION 1..9: note = ATaRI peptide
SNSPKENNR

SEQ ID NO: 3226 - protein, 38 aa, synthetic construct
  REGION 1..38: note = ATaRI peptide
PPRFQRQQVMIKIFYHVCVIEVVYYAVVWEIRHKTDNT

SEQ ID NO: 3227 - protein, 15 aa, synthetic construct
  REGION 1..15: note = ATaRI peptide
MDIPPIHPGQLNLHL

SEQ ID NO: 3228 - protein, 9 aa, synthetic construct
  REGION 1..9: note = ATaRI peptide
ATEEPEDVR

SEQ ID NO: 3229 - protein, 9 aa, synthetic construct
  REGION 1..9: note = ATaRI peptide
PPSKSGKRG

SEQ ID NO: 3230 - protein, 9 aa, synthetic construct
  REGION 1..9: note = ATaRI peptide
KKEEQVIQV

SEQ ID NO: 3231 - protein, 21 aa, synthetic construct
  REGION 1..21: note = ATaRI peptide
VLNDISKKCKLQKRSEGWGMA

SEQ ID NO: 3232 - protein, 9 aa, synthetic construct
  REGION 1..9: note = ATaRI peptide
TTPTSSPFR

SEQ ID NO: 3233 - protein, 16 aa, synthetic construct
  REGION 1..16: note = ATaRI peptide
QMWWRGCKVSKSEATG

SEQ ID NO: 3234 - protein, 9 aa, synthetic construct
  REGION 1..9: note = ATaRI peptide
INISSPGKR

SEQ ID NO: 3235 - protein, 63 aa, synthetic construct
  REGION 1..63: note = ATaRI peptide
DNHFAIFISELGLLPLFPGGAGLQGLGLGLGLGLRLGWGFGGILDCFLSCRGLYFQRIRLPKA

SEQ ID NO: 3236 - protein, 19 aa, synthetic construct
  REGION 1..19: note = ATaRI peptide
LAKEVDPQGECVTTKMRRN

SEQ ID NO: 3237 - protein, 47 aa, synthetic construct
  REGION 1..47: note = ATaRI peptide
HLQKVLNQVKMFFQATRTIMKYVSRCWNSYLLFLSLFFFPKQDMQLQ

SEQ ID NO: 3238 - protein, 9 aa, synthetic construct
  REGION 1..9: note = ATaRI peptide
TRKTKALLQ

SEQ ID NO: 3239 - protein, 35 aa, synthetic construct
  REGION 1..35: note = ATaRI peptide
TVKKCTKKVSSNYLTFQYVALVYQHSLSHCMILFP

SEQ ID NO: 3240 - protein, 31 aa, synthetic construct
  REGION 1..31: note = ATaRI peptide
REGKTKDQVKRGLPWWAGRLWEVEGLCKVVW

SEQ ID NO: 3241 - protein, 71 aa, synthetic construct
  REGION 1..71: note = ATaRI peptide
HEDFIGFAKYVKHLMATCIPPVDLSQTHIVNFYYSFTTFENTICARINSQCAYLGSLSSMVVGQGYLLFSQ

SEQ ID NO: 3242 - protein, 13 aa, synthetic construct
  REGION 1..13: note = ATaRI peptide
LSWYKDDEVSHRE

SEQ ID NO: 3243 - protein, 10 aa, synthetic construct
  REGION 1..10: note = ATaRI peptide
QELFDEDYGK

SEQ ID NO: 3244 - protein, 9 aa, synthetic construct
  REGION 1..9: note = ATaRI peptide
VSTPVPSPE

SEQ ID NO: 3245 - protein, 9 aa, synthetic construct
  REGION 1..9: note = ATaRI peptide
RYLEELSQR

SEQ ID NO: 3246 - protein, 19 aa, synthetic construct
  REGION 1..19: note = ATaRI peptide
TSRIAEEQVGFYIPYLLFI

SEQ ID NO: 3247 - protein, 32 aa, synthetic construct
  REGION 1..32: note = ATaRI peptide
TVAELKREVIVIAGIARPNACIEVVIKPGLLT

SEQ ID NO: 3248 - protein, 9 aa, synthetic construct
  REGION 1..9: note = ATaRI peptide
SNQYPSPKR

SEQ ID NO: 3249 - protein, 34 aa, synthetic construct
  REGION 1..34: note = ATaRI peptide
LKFSPEKKVIVYFFLSLLLCFVIINEEKRLKGLR

SEQ ID NO: 3250 - protein, 18 aa, synthetic construct
  REGION 1..18: note = ATaRI peptide
RCGEVLFAGLDLNILLVN

SEQ ID NO: 3251 - protein, 9 aa, synthetic construct
  REGION 1..9: note = ATaRI peptide
DGTSPLNTG

SEQ ID NO: 3252 - protein, 9 aa, synthetic construct
  REGION 1..9: note = ATaRI peptide
FDPDANTWR

SEQ ID NO: 3253 - protein, 28 aa, synthetic construct
  REGION 1..28: note = ATaRI peptide
QVIIPQDEVIENFLLLSKSFFDAIAGVS

SEQ ID NO: 3254 - protein, 25 aa, synthetic construct
  REGION 1..25: note = ATaRI peptide
FEIKNFVKVPTSVINKIEYLENVDD

SEQ ID NO: 3255 - protein, 24 aa, synthetic construct
  REGION 1..24: note = ATaRI peptide
AICIPEGAVSEVQFYVSLECMLWK

SEQ ID NO: 3256 - protein, 11 aa, synthetic construct
  REGION 1..11: note = ATaRI peptide
FAADHFNQVRS

SEQ ID NO: 3257 - protein, 23 aa, synthetic construct
  REGION 1..23: note = ATaRI peptide
GQQAVKLTGRFGLVWFSHVMAIV

SEQ ID NO: 3258 - protein, 14 aa, synthetic construct
  REGION 1..14: note = ATaRI peptide
LILDPSNTGTVLNS

SEQ ID NO: 3259 - protein, 12 aa, synthetic construct
  REGION 1..12: note = ATaRI peptide
FSCEIKEAVSII

SEQ ID NO: 3260 - protein, 23 aa, synthetic construct
  REGION 1..23: note = ATaRI peptide
KQEEETAQVKGIICRLFFTKVCW

SEQ ID NO: 3261 - protein, 100 aa, synthetic construct
  REGION 1..100: note = ATaRI peptide
QPSSTACHRYRTQGFLSLSSFLRRGPLGAGGGPCSGAAWRRVGSLLCWLLALPGPHPLSHVPCLQNRSNFLLTEEALSKGQSFSCLPEIRRRGEHTGVSG

SEQ ID NO: 3262 - protein, 154 aa, synthetic construct
  REGION 1..154: note = ATaRI peptide
PPPLSPAQVRAYWGVSTPSHPWGCCRFFFPPQLPHSSHFLLPTATAGVRAIQQLGSPLPAPVPCSVGGWNPLRSLPHYLTSSHSQRLGPLSISFRPPSEVQLHSLLGFHVRLLLNFFPLALHVLFQKESAKPRCPVLLGAYFLPPFRLPEENYF

SEQ ID NO: 3263 - protein, 58 aa, synthetic construct
  REGION 1..58: note = ATaRI peptide
PEGLSPQQVCGGVGQVGVCRGRGGLGVPACSLGPRLSGSHRGYDDWGLLAEPSWIGAS

SEQ ID NO: 3264 - protein, 26 aa, synthetic construct
  REGION 1..26: note = ATaRI peptide
IGDLFVASVSVPKLFPQPTKVKPQPV

SEQ ID NO: 3265 - protein, 75 aa, synthetic construct
  REGION 1..75: note = ATaRI peptide
PAFLEFLKVGLHGGTVPGQGGQGDCSGGREHFGPSFGYDIIALAWTAPLFLLGQPSPMGRKSFPPAPGRSVAKCL

SEQ ID NO: 3266 - protein, 31 aa, synthetic construct
  REGION 1..31: note = ATaRI peptide
PQFILLLQVLLRIPAASTHRVCLWAGRCLLG

SEQ ID NO: 3267 - protein, 73 aa, synthetic construct
  REGION 1..73: note = ATaRI peptide
SDRSSLNKVSWASHLPALTCLPSPVLLPVPLPHATHTRWQCSLREGRPCSSKDVTLGIGSSAGPPRSFLFMLF

SEQ ID NO: 3268 - protein, 43 aa, synthetic construct
  REGION 1..43: note = ATaRI peptide
TRTTFLLPGEAASGTGERTVTEHLPRPGSGVTWAAHPIFPHQP

SEQ ID NO: 3269 - protein, 59 aa, synthetic construct
  REGION 1..59: note = ATaRI peptide
LEGIPKITGEALGAGVGRTRGSAAGGQWGLAGRVYYALIGIGMGFQSPASSHLRWHGGQ

SEQ ID NO: 3270 - protein, 9 aa, synthetic construct
  REGION 1..9: note = ATaRI peptide
IQNLANFAK

SEQ ID NO: 3271 - protein, 24 aa, synthetic construct
  REGION 1..24: note = ATaRI peptide
KIFEDPTDRYERENLTTISEKHNV

SEQ ID NO: 3272 - protein, 25 aa, synthetic construct
  REGION 1..25: note = ATaRI peptide
DEAKHAEKVEPSLLHQLSDPKMTGH

SEQ ID NO: 3273 - protein, 9 aa, synthetic construct
  REGION 1..9: note = ATaRI peptide
SILQLLLLR

SEQ ID NO: 3274 - protein, 22 aa, synthetic construct
  REGION 1..22: note = ATaRI peptide
DLQQSCEYGKFLGDNAKPLRLL

SEQ ID NO: 3275 - protein, 19 aa, synthetic construct
  REGION 1..19: note = ATaRI peptide
TLSSGISIGEKYFSERVAI

SEQ ID NO: 3276 - protein, 9 aa, synthetic construct
  REGION 1..9: note = ATaRI peptide
LILLDNAKR

SEQ ID NO: 3277 - protein, 90 aa, synthetic construct
  REGION 1..90: note = ATaRI peptide
PKYVDLYKVRPTRAGVRPLCWEGDPSASPSLQGNGLWRSLGRWGQVAEPVTEPLRPLLTEALSMWKRLAFQTPPPALSPNSHTREAGHCA

SEQ ID NO: 3278 - protein, 9 aa, synthetic construct
  REGION 1..9: note = ATaRI peptide
GEKNNHRAK

SEQ ID NO: 3279 - protein, 9 aa, synthetic construct
  REGION 1..9: note = ATaRI peptide
VVDYIDEGR

SEQ ID NO: 3280 - protein, 11 aa, synthetic construct
  REGION 1..11: note = ATaRI peptide
RFIIIFEQVRF

SEQ ID NO: 3281 - protein, 10 aa, synthetic construct
  REGION 1..10: note = ATaRI peptide
LNSAKEKSSM

SEQ ID NO: 3282 - protein, 12 aa, synthetic construct
  REGION 1..12: note = ATaRI peptide
FGDRMFYKVVYT

SEQ ID NO: 3283 - protein, 15 aa, synthetic construct
  REGION 1..15: note = ATaRI peptide
FVLFMFFGSKYLGML

SEQ ID NO: 3284 - protein, 32 aa, synthetic construct
  REGION 1..32: note = ATaRI peptide
RQHCPLKNVSHQPGWSAKEPVYSLFVRVGGQC

SEQ ID NO: 3285 - protein, 15 aa, synthetic construct
  REGION 1..15: note = ATaRI peptide
SVELMPAWVLSTGIG

SEQ ID NO: 3286 - protein, 27 aa, synthetic construct
  REGION 1..27: note = ATaRI peptide
SRDSDESGGNIALYTYDSSHRTIFGIP

SEQ ID NO: 3287 - protein, 26 aa, synthetic construct
  REGION 1..26: note = ATaRI peptide
QSPSTSSRRKFMYSVFIKYFCKIGIP

SEQ ID NO: 3288 - protein, 30 aa, synthetic construct
  REGION 1..30: note = ATaRI peptide
ATRKISRKGMYEVTSKYIHILNINFDKTDS

SEQ ID NO: 3289 - protein, 19 aa, synthetic construct
  REGION 1..19: note = ATaRI peptide
FREPLVSYRLVLRKKKGIK

SEQ ID NO: 3290 - protein, 37 aa, synthetic construct
  REGION 1..37: note = ATaRI peptide
QHVTQETQVIVVTYTKESHSWLGNAYLLYYLKITHHS

SEQ ID NO: 3291 - protein, 9 aa, synthetic construct
  REGION 1..9: note = ATaRI peptide
SEPPQPLAR

SEQ ID NO: 3292 - protein, 30 aa, synthetic construct
  REGION 1..30: note = ATaRI peptide
KSYQLYGKGEKNKYSLYCLYIKMNYFIISV

SEQ ID NO: 3293 - protein, 9 aa, synthetic construct
  REGION 1..9: note = ATaRI peptide
EKKSTLEPQ

SEQ ID NO: 3294 - protein, 9 aa, synthetic construct
  REGION 1..9: note = ATaRI peptide
EDLSGHSVR

SEQ ID NO: 3295 - protein, 10 aa, synthetic construct
  REGION 1..10: note = ATaRI peptide
TENMAPIPGK

SEQ ID NO: 3296 - protein, 29 aa, synthetic construct
  REGION 1..29: note = ATaRI peptide
VSLAQIIKVFLEFFSFLWFFFFLRYLKWS

SEQ ID NO: 3297 - protein, 21 aa, synthetic construct
  REGION 1..21: note = ATaRI peptide
DAARQICEVGATENTSLFTSF

SEQ ID NO: 3298 - protein, 9 aa, synthetic construct
  REGION 1..9: note = ATaRI peptide
LAWLEHQKK

SEQ ID NO: 3299 - protein, 12 aa, synthetic construct
  REGION 1..12: note = ATaRI peptide
EDQRTEQKGNKY

SEQ ID NO: 3300 - protein, 10 aa, synthetic construct
  REGION 1..10: note = ATaRI peptide
SSTSPSKHVS

SEQ ID NO: 3301 - protein, 13 aa, synthetic construct
  REGION 1..13: note = ATaRI peptide
PNNLDEIKVNCKL

SEQ ID NO: 3302 - protein, 14 aa, synthetic construct
  REGION 1..14: note = ATaRI peptide
LILLQNYQVLRFLP

SEQ ID NO: 3303 - protein, 11 aa, synthetic construct
  REGION 1..11: note = ATaRI peptide
GLLPNNSEGRV

SEQ ID NO: 3304 - protein, 66 aa, synthetic construct
  REGION 1..66: note = ATaRI peptide
LVWRRRPRGERHMEGIQGAADSPASLQFYFLHLLLPPPFRNGLALRLGSQKDLGQPSHHVGDTKHG

SEQ ID NO: 3305 - protein, 10 aa, synthetic construct
  REGION 1..10: note = ATaRI peptide
FFLKPWTKGK

SEQ ID NO: 3306 - protein, 31 aa, synthetic construct
  REGION 1..31: note = ATaRI peptide
IYIKQLGRSKCYCFPNIPSLCIEKESSHFKS

SEQ ID NO: 3307 - protein, 16 aa, synthetic construct
  REGION 1..16: note = ATaRI peptide
EQDHDLQAVSLNYLDK

SEQ ID NO: 3308 - protein, 9 aa, synthetic construct
  REGION 1..9: note = ATaRI peptide
LCSRARFER

SEQ ID NO: 3309 - protein, 16 aa, synthetic construct
  REGION 1..16: note = ATaRI peptide
IEAEHTLRGTYKYKPT

SEQ ID NO: 3310 - protein, 20 aa, synthetic construct
  REGION 1..20: note = ATaRI peptide
LINSGFPEGKTSSILKISLK

SEQ ID NO: 3311 - protein, 21 aa, synthetic construct
  REGION 1..21: note = ATaRI peptide
GQIVLVDDWYGFSDVNSKLNS

SEQ ID NO: 3312 - protein, 9 aa, synthetic construct
  REGION 1..9: note = ATaRI peptide
INLMIGSTR

SEQ ID NO: 3313 - protein, 21 aa, synthetic construct
  REGION 1..21: note = ATaRI peptide
GFGPEGCKRKGCWWHTTLSFH

SEQ ID NO: 3314 - protein, 38 aa, synthetic construct
  REGION 1..38: note = ATaRI peptide
AKVAAANVVSDCKRLRWGWGRPLGFVASLLLAVECFFN

SEQ ID NO: 3315 - protein, 9 aa, synthetic construct
  REGION 1..9: note = ATaRI peptide
FEIEELNRK

SEQ ID NO: 3316 - protein, 13 aa, synthetic construct
  REGION 1..13: note = ATaRI peptide
CLVHLGDIGEPLL

SEQ ID NO: 3317 - protein, 43 aa, synthetic construct
  REGION 1..43: note = ATaRI peptide
AAQLVPSNGEWTCQPEIDRDTLFFITMWQITQGSPLKFYESNK

SEQ ID NO: 3318 - protein, 40 aa, synthetic construct
  REGION 1..40: note = ATaRI peptide
EEDLSSISGKGYPNLVLLMWFSIINGGLMPEKKRFLVMND

SEQ ID NO: 3319 - protein, 9 aa, synthetic construct
  REGION 1..9: note = ATaRI peptide
KWIADNQPR

SEQ ID NO: 3320 - protein, 12 aa, synthetic construct
  REGION 1..12: note = ATaRI peptide
GKQNVAVQVSCI

SEQ ID NO: 3321 - protein, 13 aa, synthetic construct
  REGION 1..13: note = ATaRI peptide
FPPLPSRPGKYVL

SEQ ID NO: 3322 - protein, 20 aa, synthetic construct
  REGION 1..20: note = ATaRI peptide
PVPRMPFEVCVLSYHQAIWR

SEQ ID NO: 3323 - protein, 30 aa, synthetic construct
  REGION 1..30: note = ATaRI peptide
EKWINIAHVIVFYKIFFVFGRCKRLLHHFV

SEQ ID NO: 3324 - protein, 15 aa, synthetic construct
  REGION 1..15: note = ATaRI peptide
TPDEPQKKVYTQPFS

SEQ ID NO: 3325 - protein, 22 aa, synthetic construct
  REGION 1..22: note = ATaRI peptide
TPGWALTLRSGGARGAGRRPGP

SEQ ID NO: 3326 - protein, 15 aa, synthetic construct
  REGION 1..15: note = ATaRI peptide
AARNQENLVRIDFLT

SEQ ID NO: 3327 - protein, 9 aa, synthetic construct
  REGION 1..9: note = ATaRI peptide
GLVHQPRAK

SEQ ID NO: 3328 - protein, 28 aa, synthetic construct
  REGION 1..28: note = ATaRI peptide
GLKIQAMNRYMGKRVREGSCFSEYFINN

SEQ ID NO: 3329 - protein, 14 aa, synthetic construct
  REGION 1..14: note = ATaRI peptide
SSPNFGEKVRILIY

SEQ ID NO: 3330 - protein, 10 aa, synthetic construct
  REGION 1..10: note = ATaRI peptide
HSRENLTQVR

SEQ ID NO: 3331 - protein, 35 aa, synthetic construct
  REGION 1..35: note = ATaRI peptide
EDDVHSSSGIPYMLMCMLPYAFLKINVPIFNFYNI

SEQ ID NO: 3332 - protein, 19 aa, synthetic construct
  REGION 1..19: note = ATaRI peptide
IQLASQKHCKYCSLRVPPD

SEQ ID NO: 3333 - protein, 21 aa, synthetic construct
  REGION 1..21: note = ATaRI peptide
SLYKNLRKGMNLLFFSLAVLY

SEQ ID NO: 3334 - protein, 16 aa, synthetic construct
  REGION 1..16: note = ATaRI peptide
NLLQTFAEVRCLWNAS

SEQ ID NO: 3335 - protein, 13 aa, synthetic construct
  REGION 1..13: note = ATaRI peptide
YNFLIKYEVWEIF

SEQ ID NO: 3336 - protein, 19 aa, synthetic construct
  REGION 1..19: note = ATaRI peptide
GKITLDVGCKPPDLIGQFV

SEQ ID NO: 3337 - protein, 32 aa, synthetic construct
  REGION 1..32: note = ATaRI peptide
EASHDTCVGKCQPYYISFLWALLLIKVCVQHL

SEQ ID NO: 3338 - protein, 18 aa, synthetic construct
  REGION 1..18: note = ATaRI peptide
CLWPFNRTGMYLLLCIYN

SEQ ID NO: 3339 - protein, 17 aa, synthetic construct
  REGION 1..17: note = ATaRI peptide
WATEHACQVILFFCLYV

SEQ ID NO: 3340 - protein, 26 aa, synthetic construct
  REGION 1..26: note = ATaRI peptide
DFQNALRRVSLIYRKFLMKSVICYFY

SEQ ID NO: 3341 - protein, 41 aa, synthetic construct
  REGION 1..41: note = ATaRI peptide
LHICASTKKYLLFSLWFKSTKYQNNILARFFCYLFKSSFKK

SEQ ID NO: 3342 - protein, 31 aa, synthetic construct
  REGION 1..31: note = ATaRI peptide
TYDIHDPKVRNLLFKDFSVSQSIFNQNSAFI

SEQ ID NO: 3343 - protein, 13 aa, synthetic construct
  REGION 1..13: note = ATaRI peptide
DVRVLTQLVNILK

SEQ ID NO: 3344 - protein, 10 aa, synthetic construct
  REGION 1..10: note = ATaRI peptide
LLKIQQNIGI

SEQ ID NO: 3345 - protein, 20 aa, synthetic construct
  REGION 1..20: note = ATaRI peptide
SHLKPSSEGKHKIFIGKKGG

SEQ ID NO: 3346 - protein, 11 aa, synthetic construct
  REGION 1..11: note = ATaRI peptide
AAFYKTFKVVI

SEQ ID NO: 3347 - protein, 64 aa, synthetic construct
  REGION 1..64: note = ATaRI peptide
PVYVRRAAVSRIHFTYLSIYQFYFYLFKRQGLALLPGLGCSGVIIAHCSLELLGSSDLPTSAFK

SEQ ID NO: 3348 - protein, 18 aa, synthetic construct
  REGION 1..18: note = ATaRI peptide
LGYLNGEACEYFLNCSQS

SEQ ID NO: 3349 - protein, 9 aa, synthetic construct
  REGION 1..9: note = ATaRI peptide
GIVQTEQIR

SEQ ID NO: 3350 - protein, 30 aa, synthetic construct
  REGION 1..30: note = ATaRI peptide
QERFKGKEGKLLNSYLPLSVVVLNLRGSVA

SEQ ID NO: 3351 - protein, 9 aa, synthetic construct
  REGION 1..9: note = ATaRI peptide
LCFAASTFP

SEQ ID NO: 3352 - protein, 16 aa, synthetic construct
  REGION 1..16: note = ATaRI peptide
SPDLPICKGECLSYNC

SEQ ID NO: 3353 - protein, 9 aa, synthetic construct
  REGION 1..9: note = ATaRI peptide
WSSPPQCEG

SEQ ID NO: 3354 - protein, 28 aa, synthetic construct
  REGION 1..28: note = ATaRI peptide
HSRRVMHRGKIKSLSTFNLVLNDVSSSK

SEQ ID NO: 3355 - protein, 20 aa, synthetic construct
  REGION 1..20: note = ATaRI peptide
DDIPFEKHGRFTVGHCVLQE

SEQ ID NO: 3356 - protein, 17 aa, synthetic construct
  REGION 1..17: note = ATaRI peptide
QLNAPLWQVGHLFKHLS

SEQ ID NO: 3357 - protein, 24 aa, synthetic construct
  REGION 1..24: note = ATaRI peptide
RMNQGKRNSKSMTNIYRSSKWLCW

SEQ ID NO: 3358 - protein, 9 aa, synthetic construct
  REGION 1..9: note = ATaRI peptide
DSSSDFPSR

SEQ ID NO: 3359 - protein, 55 aa, synthetic construct
  REGION 1..55: note = ATaRI peptide
KTPIKGPPGNIAYYEESVHKKHQLDWFVILTWLYFDVQNWIHSLRLCMLPFGKPK

SEQ ID NO: 3360 - protein, 9 aa, synthetic construct
  REGION 1..9: note = ATaRI peptide
VHSGKRTPR

SEQ ID NO: 3361 - protein, 9 aa, synthetic construct
  REGION 1..9: note = ATaRI peptide
RRGQSQSLR

SEQ ID NO: 3362 - protein, 31 aa, synthetic construct
  REGION 1..31: note = ATaRI peptide
RALGPRAQVRLLWRDPGARQEGCFVGEGLQF

SEQ ID NO: 3363 - protein, 14 aa, synthetic construct
  REGION 1..14: note = ATaRI peptide
RPPETTERVSQLLD

SEQ ID NO: 3364 - protein, 9 aa, synthetic construct
  REGION 1..9: note = ATaRI peptide
YKIFTMAEV

SEQ ID NO: 3365 - protein, 10 aa, synthetic construct
  REGION 1..10: note = ATaRI peptide
VEDPVDSDGM

SEQ ID NO: 3366 - protein, 12 aa, synthetic construct
  REGION 1..12: note = ATaRI peptide
YMQITEEQVNNI

SEQ ID NO: 3367 - protein, 12 aa, synthetic construct
  REGION 1..12: note = ATaRI peptide
IAAQDLLLVSLP

SEQ ID NO: 3368 - protein, 9 aa, synthetic construct
  REGION 1..9: note = ATaRI peptide
ISAVRAIWG

SEQ ID NO: 3369 - protein, 27 aa, synthetic construct
  REGION 1..27: note = ATaRI peptide
AIFLKYSNGMLPGRMYYEGHQRKGGGW

SEQ ID NO: 3370 - protein, 56 aa, synthetic construct
  REGION 1..56: note = ATaRI peptide
KIPAGLCAVSGRVCVCVCVREIYKCHPQMHLADKNLIALEIHGVILLSSFACKDSG

SEQ ID NO: 3371 - protein, 19 aa, synthetic construct
  REGION 1..19: note = ATaRI peptide
TDDNATMQVSETWRVEEGR

SEQ ID NO: 3372 - protein, 21 aa, synthetic construct
  REGION 1..21: note = ATaRI peptide
AETLSVMQVREQWGVGFLLPG

SEQ ID NO: 3373 - protein, 9 aa, synthetic construct
  REGION 1..9: note = ATaRI peptide
YGQYEGKVR

SEQ ID NO: 3374 - protein, 24 aa, synthetic construct
  REGION 1..24: note = ATaRI peptide
RTRSKSAKSGCCCDSSNPLPIRRG

SEQ ID NO: 3375 - protein, 34 aa, synthetic construct
  REGION 1..34: note = ATaRI peptide
PLYQIDLQVRVSRDILQMTMSQAMETGIWAQIHL

SEQ ID NO: 3376 - protein, 23 aa, synthetic construct
  REGION 1..23: note = ATaRI peptide
YKYSALIEVRRLRLGAPALGMKK

SEQ ID NO: 3377 - protein, 32 aa, synthetic construct
  REGION 1..32: note = ATaRI peptide
AKGYSEVLRYCPFTSIRSGSLGEDGIGFGSRG

SEQ ID NO: 3378 - protein, 11 aa, synthetic construct
  REGION 1..11: note = ATaRI peptide
LLQKKQNVVSF

SEQ ID NO: 3379 - protein, 43 aa, synthetic construct
  REGION 1..43: note = ATaRI peptide
ESETEKEAGNAKMFIVKILYLHSVRRLLLVRELARPHRTPKRA

SEQ ID NO: 3380 - protein, 9 aa, synthetic construct
  REGION 1..9: note = ATaRI peptide
SDIEEKENR

SEQ ID NO: 3381 - protein, 50 aa, synthetic construct
  REGION 1..50: note = ATaRI peptide
NSQVWCREGTWVSFFSHLYSLFCNYFLCHILASKPGTFARAIKLQKYLIF

SEQ ID NO: 3382 - protein, 39 aa, synthetic construct
  REGION 1..39: note = ATaRI peptide
RQTRRSTQVSVAFFKMSFCVSTLLLEVQSKHTAISMFNC

SEQ ID NO: 3383 - protein, 19 aa, synthetic construct
  REGION 1..19: note = ATaRI peptide
DSNRDYKKVGSLFNFPVLW

SEQ ID NO: 3384 - protein, 32 aa, synthetic construct
  REGION 1..32: note = ATaRI peptide
KKKSKRHKGMELVLFWFIRPACGDKLKMLLSQ

SEQ ID NO: 3385 - protein, 26 aa, synthetic construct
  REGION 1..26: note = ATaRI peptide
FNFKFKKQVRGLLFVFQIIPCSKRFP

SEQ ID NO: 3386 - protein, 153 aa, synthetic construct
  REGION 1..153: note = ATaRI peptide
IEEQHHHKVPGCGQPRPAWEGRVAGRKGHPAFNAAALIPGSVSAYVSALHTLFRDFSLEPIMVGALLPTGKEETEARSIGQRWTAERQGPVRGSTPGFGGSFKPWCSQSLVILGGFASVLASAMSVRSEGVLGPSAAQPHLLCICAVVRGRQA

SEQ ID NO: 3387 - protein, 73 aa, synthetic construct
  REGION 1..73: note = ATaRI peptide
SRDGATGHGLCPLPNGGLGGHWGIRSRKVYLDWPSLPASQGPVGGSPRQVTSDLQKQFLVRAIHGGVDCLVRG

SEQ ID NO: 3388 - protein, 24 aa, synthetic construct
  REGION 1..24: note = ATaRI peptide
SAPPTSRTVSGPSFAQDIFRGPGT

SEQ ID NO: 3389 - protein, 111 aa, synthetic construct
  REGION 1..111: note = ATaRI peptide
QIPTQNTQVGSLLISQLESLPVSLTCSLSFPHTQRLRYLGGWGAFLGPMPEGIAMSSILQVIAVHKQALMGTHGLHIQSTPSVGLAHSVLLQCASPSCPGYLYLLLTPLHS

SEQ ID NO: 3390 - protein, 13 aa, synthetic construct
  REGION 1..13: note = ATaRI peptide
GTDRKLDDVSTWP

SEQ ID NO: 3391 - protein, 14 aa, synthetic construct
  REGION 1..14: note = ATaRI peptide
SAYTSKILVSISFA

SEQ ID NO: 3392 - protein, 12 aa, synthetic construct
  REGION 1..12: note = ATaRI peptide
LIRNEKGEVGPG

SEQ ID NO: 3393 - protein, 49 aa, synthetic construct
  REGION 1..49: note = ATaRI peptide
VLGTFICQVRFYLQLGQEIWNDKGQKLGARVPYIPRKRNEGITGTGAVS

SEQ ID NO: 3394 - protein, 18 aa, synthetic construct
  REGION 1..18: note = ATaRI peptide
KTKSRKQLGKDRSGLTEF

SEQ ID NO: 3395 - protein, 136 aa, synthetic construct
  REGION 1..136: note = ATaRI peptide
PGEFQGLLGQCPRPASILTPMRCTWALCSAGQAHSPRWQQIQAEVVILGVRRHVGKQGGTAKFSLRLEAGSPIRAGPRLMPVLTRLIVTVHLCVTQSLLLRTRWGDGTHMLKFGFKVIYQIFQMIWENQPDYTSKN

SEQ ID NO: 3396 - protein, 9 aa, synthetic construct
  REGION 1..9: note = ATaRI peptide
QSFSVKDPR

SEQ ID NO: 3397 - protein, 16 aa, synthetic construct
  REGION 1..16: note = ATaRI peptide
VGKVSDKKVCCGKIPC

SEQ ID NO: 3398 - protein, 20 aa, synthetic construct
  REGION 1..20: note = ATaRI peptide
RMSRRASLVSPKRVRGHKVG

SEQ ID NO: 3399 - protein, 17 aa, synthetic construct
  REGION 1..17: note = ATaRI peptide
KVLNELYSVNQMGCLAL

SEQ ID NO: 3400 - protein, 9 aa, synthetic construct
  REGION 1..9: note = ATaRI peptide
QRTDCSLAR

SEQ ID NO: 3401 - protein, 111 aa, synthetic construct
  REGION 1..111: note = ATaRI peptide
LSSSLGTERWVFASGQLGPLSPALSAPHPRYFQQCTSSPPSQGYCLPCPPRIEGTRTLSLIPTSPNNCNGSPKTQSLTCRGRGPWGHRLSRYQGGLPIPRRGLCPAKSFSE

SEQ ID NO: 3402 - protein, 32 aa, synthetic construct
  REGION 1..32: note = ATaRI peptide
RDQVHEDRRSVGFSFFVGWEWGSGQLQRSSNL

SEQ ID NO: 3403 - protein, 9 aa, synthetic construct
  REGION 1..9: note = ATaRI peptide
LQATATTPS

SEQ ID NO: 3404 - protein, 64 aa, synthetic construct
  REGION 1..64: note = ATaRI peptide
NIAHRDVKVPAVHNPEPECCGGQQRGCGHPRDGCQATLRPCCLVPEHAILCLVGPCPLCPWANP

SEQ ID NO: 3405 - protein, 17 aa, synthetic construct
  REGION 1..17: note = ATaRI peptide
PCYTPYYVGKSTGGPGT

SEQ ID NO: 3406 - protein, 9 aa, synthetic construct
  REGION 1..9: note = ATaRI peptide
SLGVIMYIL

SEQ ID NO: 3407 - protein, 24 aa, synthetic construct
  REGION 1..24: note = ATaRI peptide
SDIEEFCNRKFFIFLEKFWEWNVS

SEQ ID NO: 3408 - protein, 9 aa, synthetic construct
  REGION 1..9: note = ATaRI peptide
TISFSCNTG

SEQ ID NO: 3409 - protein, 85 aa, synthetic construct
  REGION 1..85: note = ATaRI peptide
LLALPVAWGERRAGVGRRPGGRGTRGPAENSRAALSCAALRARVRRQRDGWAERATRQGGGCRILLRTGDPRCFWVSVEFPGAGA

SEQ ID NO: 3410 - protein, 69 aa, synthetic construct
  REGION 1..69: note = ATaRI peptide
ARSIPSMTGLKGRGRAPQSPEMYPRVWSSGLPDSAAPAFSHYSLAPAVLGRGDSGAIPPGDGVLHGPFC

SEQ ID NO: 3411 - protein, 36 aa, synthetic construct
  REGION 1..36: note = ATaRI peptide
AESTESPESKCLYYRLIIFARTIDSSSHEHGTLYTV

SEQ ID NO: 3412 - protein, 16 aa, synthetic construct
  REGION 1..16: note = ATaRI peptide
NSSLKASQGHSTVCVI

SEQ ID NO: 3413 - protein, 55 aa, synthetic construct
  REGION 1..55: note = ATaRI peptide
PKTTHELKVSVAWSSRSQIEKALNKTVVLGFSGLPECMIYTCSRWLDREAGHKEG

SEQ ID NO: 3414 - protein, 22 aa, synthetic construct
  REGION 1..22: note = ATaRI peptide
TSDIGNVQVTTLRYPPLHSVII

SEQ ID NO: 3415 - protein, 59 aa, synthetic construct
  REGION 1..59: note = ATaRI peptide
KEVIKSQEVRKSLLLSSSSQGDGEEVSELDIEIGAGEWSRETFLGVHILLLWGHIRPYS

SEQ ID NO: 3416 - protein, 26 aa, synthetic construct
  REGION 1..26: note = ATaRI peptide
IDQKFVQQVRNSFVLDSHIFILAMIY

SEQ ID NO: 3417 - protein, 9 aa, synthetic construct
  REGION 1..9: note = ATaRI peptide
KQINNIFLR

SEQ ID NO: 3418 - protein, 9 aa, synthetic construct
  REGION 1..9: note = ATaRI peptide
AELLEILGR

SEQ ID NO: 3419 - protein, 13 aa, synthetic construct
  REGION 1..13: note = ATaRI peptide
SSYKAERQRYLIF

SEQ ID NO: 3420 - protein, 22 aa, synthetic construct
  REGION 1..22: note = ATaRI peptide
TINLLQEQGISFPEKNRPNVQV

SEQ ID NO: 3421 - protein, 21 aa, synthetic construct
  REGION 1..21: note = ATaRI peptide
PSIIRSGQVNFFIETHLILMK

SEQ ID NO: 3422 - protein, 29 aa, synthetic construct
  REGION 1..29: note = ATaRI peptide
PALGPEKQVNGFLISILFRLYLSFEFFSI

SEQ ID NO: 3423 - protein, 31 aa, synthetic construct
  REGION 1..31: note = ATaRI peptide
FVLLLITYGKWFSCTFFNVCVSLSALWILFI

SEQ ID NO: 3424 - protein, 24 aa, synthetic construct
  REGION 1..24: note = ATaRI peptide
TARILAKQVRKWDNVQVHFILFFF

SEQ ID NO: 3425 - protein, 42 aa, synthetic construct
  REGION 1..42: note = ATaRI peptide
LAVKEFESRKSFCDQPRSSLSHRFHMGWAGLKRGRASLCSEE

SEQ ID NO: 3426 - protein, 49 aa, synthetic construct
  REGION 1..49: note = ATaRI peptide
QEIKPGEEVSSWLWVAAAGGLRLLFKRQCGQICAVSLDSMSCECLQQFS

SEQ ID NO: 3427 - protein, 17 aa, synthetic construct
  REGION 1..17: note = ATaRI peptide
QECTTKDKVRLFIGQER

SEQ ID NO: 3428 - protein, 17 aa, synthetic construct
  REGION 1..17: note = ATaRI peptide
LPSEETDGSRRCFLPAG

SEQ ID NO: 3429 - protein, 13 aa, synthetic construct
  REGION 1..13: note = ATaRI peptide
QYDQASTKVLDFS

SEQ ID NO: 3430 - protein, 18 aa, synthetic construct
  REGION 1..18: note = ATaRI peptide
AGGSRSQKVNYCQHPSTV

SEQ ID NO: 3431 - protein, 9 aa, synthetic construct
  REGION 1..9: note = ATaRI peptide
HGDGSAGRG

SEQ ID NO: 3432 - protein, 9 aa, synthetic construct
  REGION 1..9: note = ATaRI peptide
LRTKELDLR

SEQ ID NO: 3433 - protein, 23 aa, synthetic construct
  REGION 1..23: note = ATaRI peptide
FHGYLPPPGIFTLLNLLKNSLYH

SEQ ID NO: 3434 - protein, 15 aa, synthetic construct
  REGION 1..15: note = ATaRI peptide
TGEETVRLGKQRLQK

SEQ ID NO: 3435 - protein, 9 aa, synthetic construct
  REGION 1..9: note = ATaRI peptide
YAHFAVCYR

SEQ ID NO: 3436 - protein, 9 aa, synthetic construct
  REGION 1..9: note = ATaRI peptide
SVYLTPKTS

SEQ ID NO: 3437 - protein, 67 aa, synthetic construct
  REGION 1..67: note = ATaRI peptide
CRPSSPPKVSTYFDFHPLRFSSARSSQNRSSSRDRPSLSRFPFALFPFSCPSPHHLLFSCMLEAIRL

SEQ ID NO: 3438 - protein, 43 aa, synthetic construct
  REGION 1..43: note = ATaRI peptide
SQVLCGYLGEYTCLLYSSFDIVISNPSLVFVSCGELARGKMRF

SEQ ID NO: 3439 - protein, 76 aa, synthetic construct
  REGION 1..76: note = ATaRI peptide
EQRIELYQVMFICCCCCCCCCCFRQTLSLSLCHRLEYSGMITAHCNLELLGSNDPLASASLVNGTAGVHHHTRLSF

SEQ ID NO: 3440 - protein, 16 aa, synthetic construct
  REGION 1..16: note = ATaRI peptide
NKASAVYQVSSRFKKK

SEQ ID NO: 3441 - protein, 9 aa, synthetic construct
  REGION 1..9: note = ATaRI peptide
TDIKTAAKV

SEQ ID NO: 3442 - protein, 31 aa, synthetic construct
  REGION 1..31: note = ATaRI peptide
LPKEVLSEVNFCLYLTAFVCITGLNDNMRNS

SEQ ID NO: 3443 - protein, 11 aa, synthetic construct
  REGION 1..11: note = ATaRI peptide
FYFSIIKDRYV

SEQ ID NO: 3444 - protein, 23 aa, synthetic construct
  REGION 1..23: note = ATaRI peptide
AQRQPAGQVQHSAGAGQRGACLG

SEQ ID NO: 3445 - protein, 9 aa, synthetic construct
  REGION 1..9: note = ATaRI peptide
KQPLDTLKR

SEQ ID NO: 3446 - protein, 96 aa, synthetic construct
  REGION 1..96: note = ATaRI peptide
WPEVWAGSVSKISTYFICLIFIGFFSTVELNDCIFLGPLMELTCPLCLTVKKDGPVSPAGLGSAQSRGSAEPSEIELILASSPQGQPLGCCIRIRG

SEQ ID NO: 3447 - protein, 19 aa, synthetic construct
  REGION 1..19: note = ATaRI peptide
EELQVPTDVSCGFLSCSQL

SEQ ID NO: 3448 - protein, 15 aa, synthetic construct
  REGION 1..15: note = ATaRI peptide
EGLGGAMEGEMPMAL

SEQ ID NO: 3449 - protein, 24 aa, synthetic construct
  REGION 1..24: note = ATaRI peptide
ELANGEVGGKISLKEDGPLLPSCL

SEQ ID NO: 3450 - protein, 9 aa, synthetic construct
  REGION 1..9: note = ATaRI peptide
ASRLAGKEK

SEQ ID NO: 3451 - protein, 22 aa, synthetic construct
  REGION 1..22: note = ATaRI peptide
AGIFKHLKVKQTNKNHYLFLML

SEQ ID NO: 3452 - protein, 18 aa, synthetic construct
  REGION 1..18: note = ATaRI peptide
TANFYQKAGKLLILSLHF

SEQ ID NO: 3453 - protein, 46 aa, synthetic construct
  REGION 1..46: note = ATaRI peptide
KMCFYTAYVSIHNAKNNVNYCFSSPWSARSLISPESFISILQIMDS

SEQ ID NO: 3454 - protein, 9 aa, synthetic construct
  REGION 1..9: note = ATaRI peptide
KCQRENGFM

SEQ ID NO: 3455 - protein, 13 aa, synthetic construct
  REGION 1..13: note = ATaRI peptide
GRLMGSPPGISTL

SEQ ID NO: 3456 - protein, 14 aa, synthetic construct
  REGION 1..14: note = ATaRI peptide
AIQKITLKVLFYFI

SEQ ID NO: 3457 - protein, 9 aa, synthetic construct
  REGION 1..9: note = ATaRI peptide
KRIKTEKSR

SEQ ID NO: 3458 - protein, 15 aa, synthetic construct
  REGION 1..15: note = ATaRI peptide
LSAICLVKVSRSILL

SEQ ID NO: 3459 - protein, 11 aa, synthetic construct
  REGION 1..11: note = ATaRI peptide
EMKSTFLKVIL

SEQ ID NO: 3460 - protein, 24 aa, synthetic construct
  REGION 1..24: note = ATaRI peptide
FLTGTEKRVTVSSVSSLLLNSYST

SEQ ID NO: 3461 - protein, 38 aa, synthetic construct
  REGION 1..38: note = ATaRI peptide
SATLPSTTGISKLLTLWTGTTLPENCSLKHPFGSMLGR

SEQ ID NO: 3462 - protein, 12 aa, synthetic construct
  REGION 1..12: note = ATaRI peptide
HLAETVKEVWWE

SEQ ID NO: 3463 - protein, 9 aa, synthetic construct
  REGION 1..9: note = ATaRI peptide
KSMFDVLKK

SEQ ID NO: 3464 - protein, 9 aa, synthetic construct
  REGION 1..9: note = ATaRI peptide
NAEDFEWTR

SEQ ID NO: 3465 - protein, 24 aa, synthetic construct
  REGION 1..24: note = ATaRI peptide
KHIKAEHAGGVWVPPAESGRGLMV

SEQ ID NO: 3466 - protein, 36 aa, synthetic construct
  REGION 1..36: note = ATaRI peptide
VHVKCQHSGQYPCQHTSRLDSGPESPLHHLQLCNLG

SEQ ID NO: 3467 - protein, 33 aa, synthetic construct
  REGION 1..33: note = ATaRI peptide
SFYKLVYTGKDFILLGLQADEIFSGFIVERGYT

SEQ ID NO: 3468 - protein, 63 aa, synthetic construct
  REGION 1..63: note = ATaRI peptide
EFPGTVHLGKWDLPVTTYGAAHLPRNPPGPASGEARVASWGPSVGRGAAKALPWCSVRGGKDR

SEQ ID NO: 3469 - protein, 213 aa, synthetic construct
  REGION 1..213: note = ATaRI peptide
SSIRMEVRGRWRAPAWDPEPHFSRVGGVRAPGRAATGLRAPGHPVSLQVTGMKQAGWWACEDSPRLAGGTGPWCLGEGLGLQGSCWAEPHVCLPTFLLSPSCLLYLVNLFPSVSFLLFSVSAIPCLAVPPLSPLLLWCICDLCSAIVSPACLSLAVLLCCSPGSLPLSFSAPCLSLLVSPSVHSPLFTFLCPSVHSPLATHTWPPAAPGLTAN

SEQ ID NO: 3470 - protein, 51 aa, synthetic construct
  REGION 1..51: note = ATaRI peptide
TSATLTVKGNDCSWPRAWVAMSERVCTFLLCAHVCAVAFPVFLRVVPSFLQ

SEQ ID NO: 3471 - protein, 48 aa, synthetic construct
  REGION 1..48: note = ATaRI peptide
TSATLTIRGKDHVWPCGPVAWCLHVTESSSSSNVAQPLWQSRGCLFSN

SEQ ID NO: 3472 - protein, 56 aa, synthetic construct
  REGION 1..56: note = ATaRI peptide
TSAMLTVRGKSHMWPRRALFWCPCTDVMPSVCTHPMCSPCICATLFPSLCGVPSSL

SEQ ID NO: 3473 - protein, 58 aa, synthetic construct
  REGION 1..58: note = ATaRI peptide
TSAMLTVRGKGHMQPSSTMLSCPRVDLTPSVSAYAAFSPHVCACLCNCTSFFQPPGLL

SEQ ID NO: 3474 - protein, 13 aa, synthetic construct
  REGION 1..13: note = ATaRI peptide
TSATLTVRGKDRV

SEQ ID NO: 3475 - protein, 47 aa, synthetic construct
  REGION 1..47: note = ATaRI peptide
TSATLTVRGKDPVWSHGLVAWNLSVSVSPPSTSKCGTPVGTLRLCVL

SEQ ID NO: 3476 - protein, 47 aa, synthetic construct
  REGION 1..47: note = ATaRI peptide
TSATLTIRGKDHMWPSKAMFWCASIDFMPSVSTHSVLSPCVHVILFP

SEQ ID NO: 3477 - protein, 80 aa, synthetic construct
  REGION 1..80: note = ATaRI peptide
TSATLTVKGNDHTWPHGLMWVCVLPLCAVAGTAHLLLVDAPFLFLLLFPLSPLLMGSSVILCPGVCTELQPCDLVYQSWL

SEQ ID NO: 3478 - protein, 66 aa, synthetic construct
  REGION 1..66: note = ATaRI peptide
SSAQLTVRGSHRRAPPVTAWGENVWALLDTETYGKGSCLWRLGAWQGGGPVSWHFRAALGCQRRVG

SEQ ID NO: 3479 - protein, 74 aa, synthetic construct
  REGION 1..74: note = ATaRI peptide
SEAQLKVTGGQPLSTLVALPADAQFPGHQHNLPSGSCQRAGGRNPRLPTVILSWGWQFSNPWPLKPWTREVTGG

SEQ ID NO: 3480 - protein, 99 aa, synthetic construct
  REGION 1..99: note = ATaRI peptide
EQLVAAVEGKSHPCPRHQGGSPRPRPRLDPHRPGRVQEDKTLTLPSQGLLPGGPWRRGWAGTVGQGEPQMVDGEAAVGQAQVPAPCWRQHLCGLVEGSP

SEQ ID NO: 3481 - protein, 39 aa, synthetic construct
  REGION 1..39: note = ATaRI peptide
LGLSMLLQVREPRWVCPPSGQGGRRQQRAIGGPLPEVKA

SEQ ID NO: 3482 - protein, 54 aa, synthetic construct
  REGION 1..54: note = ATaRI peptide
PTAFDNFSGELAGGPGPGARGRGPPRGRKVARGSRGSQGGCRAPGAAPAGKPDK

SEQ ID NO: 3483 - protein, 28 aa, synthetic construct
  REGION 1..28: note = ATaRI peptide
QLCDTAGQVSITLQLSAGKGNSLLKISK

SEQ ID NO: 3484 - protein, 10 aa, synthetic construct
  REGION 1..10: note = ATaRI peptide
ASRFAQENGK

SEQ ID NO: 3485 - protein, 27 aa, synthetic construct
  REGION 1..27: note = ATaRI peptide
KILNKIESGKSLSIKQLFFCIFYTVAQ

SEQ ID NO: 3486 - protein, 26 aa, synthetic construct
  REGION 1..26: note = ATaRI peptide
NLQISLVKVIHFSVLYVLHASPLISC

SEQ ID NO: 3487 - protein, 29 aa, synthetic construct
  REGION 1..29: note = ATaRI peptide
NMWKADVQVGAFSLLVWQAQKPRRLKWEN

SEQ ID NO: 3488 - protein, 9 aa, synthetic construct
  REGION 1..9: note = ATaRI peptide
QGNPVAPIK

SEQ ID NO: 3489 - protein, 29 aa, synthetic construct
  REGION 1..29: note = ATaRI peptide
QAKRSLHQVSGASGAGRSRARAVSTACTR

SEQ ID NO: 3490 - protein, 18 aa, synthetic construct
  REGION 1..18: note = ATaRI peptide
SLIAPLLPVYVTIRSCAA

SEQ ID NO: 3491 - protein, 9 aa, synthetic construct
  REGION 1..9: note = ATaRI peptide
ETSALEASR

SEQ ID NO: 3492 - protein, 9 aa, synthetic construct
  REGION 1..9: note = ATaRI peptide
EVTGGAISR

SEQ ID NO: 3493 - protein, 15 aa, synthetic construct
  REGION 1..15: note = ATaRI peptide
GNPDAFHEVSPRPSS

SEQ ID NO: 3494 - protein, 36 aa, synthetic construct
  REGION 1..36: note = ATaRI peptide
TSNFQAIRGMFMCLFCLLSFQPIKSLKPCFWGAVFI

SEQ ID NO: 3495 - protein, 28 aa, synthetic construct
  REGION 1..28: note = ATaRI peptide
CLAAPGRVGELYRSTFCSLRIPSSICPF

SEQ ID NO: 3496 - protein, 13 aa, synthetic construct
  REGION 1..13: note = ATaRI peptide
VNEEGIQKVSIDY

SEQ ID NO: 3497 - protein, 35 aa, synthetic construct
  REGION 1..35: note = ATaRI peptide
EYVKTMLRVNANNSQLLLSHIFFTDVCSFKLLTSE

SEQ ID NO: 3498 - protein, 22 aa, synthetic construct
  REGION 1..22: note = ATaRI peptide
RSSYNLVPRCDLCFNNCLRNED

SEQ ID NO: 3499 - protein, 18 aa, synthetic construct
  REGION 1..18: note = ATaRI peptide
QMTPGFRKGNFQECNLDF

SEQ ID NO: 3500 - protein, 26 aa, synthetic construct
  REGION 1..26: note = ATaRI peptide
TTKLEEMLGKCSLIKYKFSHFVDELK

SEQ ID NO: 3501 - protein, 40 aa, synthetic construct
  REGION 1..40: note = ATaRI peptide
ASLFVDQPGKCVSGGRICLSSPWHLIVLKLCFYSLTWSLK

SEQ ID NO: 3502 - protein, 200 aa, synthetic construct
  REGION 1..200: note = ATaRI peptide
ELYKIGITCEYYSSLAAPSVSFILFIYLFIYFEPSSHSVAQAGVQWCDLGSLQPPPSGFKGFSASAFQVAGLTGFCLYFAIASSTSPLNEGSFIKALIAFFSLRSFPNLPPSQPFHFMVSFKTVYAKILLLRYFSQHLKITDEFLTNNVGVINDSVKIHHTGRARWLTPVIPALWEAEAGGSRGQEIETILANTVKPRLY

SEQ ID NO: 3503 - protein, 27 aa, synthetic construct
  REGION 1..27: note = ATaRI peptide
ESSCPQQWVSHTLMCFSSLLRYIELIL

SEQ ID NO: 3504 - protein, 37 aa, synthetic construct
  REGION 1..37: note = ATaRI peptide
ANIYLESKVGGNVVKIPPMKRVLKRVSWFAKVHFDEF

SEQ ID NO: 3505 - protein, 9 aa, synthetic construct
  REGION 1..9: note = ATaRI peptide
IAPQGLQGG

SEQ ID NO: 3506 - protein, 26 aa, synthetic construct
  REGION 1..26: note = ATaRI peptide
KKGAKSLKVKSSRLGHGVGSSLLVML

SEQ ID NO: 3507 - protein, 9 aa, synthetic construct
  REGION 1..9: note = ATaRI peptide
LLNIFQDTK

SEQ ID NO: 3508 - protein, 16 aa, synthetic construct
  REGION 1..16: note = ATaRI peptide
RDHFCELDGNTINYYN

SEQ ID NO: 3509 - protein, 40 aa, synthetic construct
  REGION 1..40: note = ATaRI peptide
IKAGHSNKVSPSSSLSVSALHCETYHLLTDSGCSKEPYYG

SEQ ID NO: 3510 - protein, 27 aa, synthetic construct
  REGION 1..27: note = ATaRI peptide
ERPDYRNISEYLPHIIIDLGEVLPKLQ

SEQ ID NO: 3511 - protein, 45 aa, synthetic construct
  REGION 1..45: note = ATaRI peptide
LGLYKVKYGKSSLNVIGRFLKTASLSKMMHSRPSNNVISFNRISL

SEQ ID NO: 3512 - protein, 23 aa, synthetic construct
  REGION 1..23: note = ATaRI peptide
YVLCYPNAGVCFKGVTHGEIKIT

SEQ ID NO: 3513 - protein, 44 aa, synthetic construct
  REGION 1..44: note = ATaRI peptide
SMMAKHLKVRGPPFTGFLRETERLNFRFRVFRRRIFPEEIPMYI

SEQ ID NO: 3514 - protein, 10 aa, synthetic construct
  REGION 1..10: note = ATaRI peptide
VFLYHAIKVW

SEQ ID NO: 3515 - protein, 40 aa, synthetic construct
  REGION 1..40: note = ATaRI peptide
RLEYALVKVSYRGLNWRAGGSSWLTDPVVGGVTVAGEGDA

SEQ ID NO: 3516 - protein, 77 aa, synthetic construct
  REGION 1..77: note = ATaRI peptide
AGKMFLPQVSKIWGEIFTVASFLCHLINGDLGYISQVLIWTRVQWYWLVIPSLNMFRSHVCKNPSSEWCGCWKSENS

SEQ ID NO: 3517 - protein, 21 aa, synthetic construct
  REGION 1..21: note = ATaRI peptide
LNGTVEEEASHFVQAYGPLVG

SEQ ID NO: 3518 - protein, 29 aa, synthetic construct
  REGION 1..29: note = ATaRI peptide
QDHYESLKVSGRNRFLLVFNVTVFYDPSF

SEQ ID NO: 3519 - protein, 9 aa, synthetic construct
  REGION 1..9: note = ATaRI peptide
KIFNDKTVG

SEQ ID NO: 3520 - protein, 67 aa, synthetic construct
  REGION 1..67: note = ATaRI peptide
LADIEQSTGRSQEAAGSCLPSSVDTLISILALRVKHVFKMEGLLITLSLMLSFFTRSYSAFYFSITD

SEQ ID NO: 3521 - protein, 53 aa, synthetic construct
  REGION 1..53: note = ATaRI peptide
GLRGEWTEVRWGWKGFPLMSTYLHTVVMGASREGKRASVIITPSLLFFLVLSV

SEQ ID NO: 3522 - protein, 26 aa, synthetic construct
  REGION 1..26: note = ATaRI peptide
DPSLMEDSGRVAAVHWAVWAGWAFLF

SEQ ID NO: 3523 - protein, 10 aa, synthetic construct
  REGION 1..10: note = ATaRI peptide
MMIALPNMVV

SEQ ID NO: 3524 - protein, 48 aa, synthetic construct
  REGION 1..48: note = ATaRI peptide
LSMYNYIEVSEKVWLYSMRWFTDILTSVLFFFFASAPISCMLYKNTYR

SEQ ID NO: 3525 - protein, 15 aa, synthetic construct
  REGION 1..15: note = ATaRI peptide
PELQQSHAGECECQS

SEQ ID NO: 3526 - protein, 29 aa, synthetic construct
  REGION 1..29: note = ATaRI peptide
RRRKMSPLVSINFSKLTKHSCVLLYCVIL

SEQ ID NO: 3527 - protein, 15 aa, synthetic construct
  REGION 1..15: note = ATaRI peptide
SREMDVTKVQKEILV

SEQ ID NO: 3528 - protein, 11 aa, synthetic construct
  REGION 1..11: note = ATaRI peptide
MEAQHDKTGRW

SEQ ID NO: 3529 - protein, 21 aa, synthetic construct
  REGION 1..21: note = ATaRI peptide
KWKPKDFLSKFSDLSCVLDFI

SEQ ID NO: 3530 - protein, 24 aa, synthetic construct
  REGION 1..24: note = ATaRI peptide
SGIEVYGRGTCTHSLNILSEDFVL

SEQ ID NO: 3531 - protein, 23 aa, synthetic construct
  REGION 1..23: note = ATaRI peptide
PGEPEERKVTWGSAGRAPRVGGG

SEQ ID NO: 3532 - protein, 15 aa, synthetic construct
  REGION 1..15: note = ATaRI peptide
KEEIKQRQVITFSFL

SEQ ID NO: 3533 - protein, 35 aa, synthetic construct
  REGION 1..35: note = ATaRI peptide
SVQEATSTRQVYKNSFINNHNFRLIVTANMTSELK

SEQ ID NO: 3534 - protein, 23 aa, synthetic construct
  REGION 1..23: note = ATaRI peptide
RQNQQSSSGMDGDESFFSTCISY

SEQ ID NO: 3535 - protein, 14 aa, synthetic construct
  REGION 1..14: note = ATaRI peptide
ICTQVKGPGISHIT

SEQ ID NO: 3536 - protein, 9 aa, synthetic construct
  REGION 1..9: note = ATaRI peptide
YKNSSRNLR

SEQ ID NO: 3537 - protein, 13 aa, synthetic construct
  REGION 1..13: note = ATaRI peptide
SSSWLQHPGRSAV

SEQ ID NO: 3538 - protein, 10 aa, synthetic construct
  REGION 1..10: note = ATaRI peptide
SEGCLGQTGK

SEQ ID NO: 3539 - protein, 13 aa, synthetic construct
  REGION 1..13: note = ATaRI peptide
KQEKEAEEGRSLP

SEQ ID NO: 3540 - protein, 14 aa, synthetic construct
  REGION 1..14: note = ATaRI peptide
AVAFAAASRYVHVT

SEQ ID NO: 3541 - protein, 33 aa, synthetic construct
  REGION 1..33: note = ATaRI peptide
RELELKVQVRGEQKTSLVFEFHFYAKLVLCVAV

SEQ ID NO: 3542 - protein, 110 aa, synthetic construct
  REGION 1..110: note = ATaRI peptide
LIENVSIYRYAQHGVGPSTLPLGAVGGVSHLNPGSTTSYLGDIGASVSSSVKWGWEQILLHSAVRKRGVHGTWLMMSIWLSGSCCCHHHQLQKTAEPTRALPPYSPPACR

SEQ ID NO: 3543 - protein, 51 aa, synthetic construct
  REGION 1..51: note = ATaRI peptide
KPIAEKLTGTRRDWRLGRRAPWPTVSSLSRSGRLEWREARGISEALDSSQL

SEQ ID NO: 3544 - protein, 32 aa, synthetic construct
  REGION 1..32: note = ATaRI peptide
FRLFVPNHRWELDPGPALAPSYSLSCSPAPGA

SEQ ID NO: 3545 - protein, 26 aa, synthetic construct
  REGION 1..26: note = ATaRI peptide
RLQMEQMQVEVYLSLDFLGSVQFLEL

SEQ ID NO: 3546 - protein, 9 aa, synthetic construct
  REGION 1..9: note = ATaRI peptide
VQATKNYNK

SEQ ID NO: 3547 - protein, 61 aa, synthetic construct
  REGION 1..61: note = ATaRI peptide
LSDFLLWQVGHFQVLLCLCHGETNCIHRMDQSGPSPLPNRLGPEYFWGKLKSGEASLGCVS

SEQ ID NO: 3548 - protein, 9 aa, synthetic construct
  REGION 1..9: note = ATaRI peptide
ETWFPVPER

SEQ ID NO: 3549 - protein, 33 aa, synthetic construct
  REGION 1..33: note = ATaRI peptide
WLWPPAGLGECARMSGPDLAVSLAAGAWEASLT

SEQ ID NO: 3550 - protein, 58 aa, synthetic construct
  REGION 1..58: note = ATaRI peptide
EFTSRTPKGASLICFVCLGLVQEGSRESVAAWGAEIVRDTDRPRYAGGQAGEFLAPWD

SEQ ID NO: 3551 - protein, 21 aa, synthetic construct
  REGION 1..21: note = ATaRI peptide
APLHSVVQVRGAGGCCSIILF

SEQ ID NO: 3552 - protein, 25 aa, synthetic construct
  REGION 1..25: note = ATaRI peptide
PKTESKSKVVIFVLTPFNFVSYLFQ

SEQ ID NO: 3553 - protein, 10 aa, synthetic construct
  REGION 1..10: note = ATaRI peptide
DPYGSMRKGD

SEQ ID NO: 3554 - protein, 27 aa, synthetic construct
  REGION 1..27: note = ATaRI peptide
RILTLMLQVSLPSFVLNVLLLHDWTRQ

SEQ ID NO: 3555 - protein, 10 aa, synthetic construct
  REGION 1..10: note = ATaRI peptide
CSVCDNCVGE

SEQ ID NO: 3556 - protein, 38 aa, synthetic construct
  REGION 1..38: note = ATaRI peptide
SNLTTNEDVSKPGATPHSRAAPSGGGRAEGAWGSQAQS

SEQ ID NO: 3557 - protein, 67 aa, synthetic construct
  REGION 1..67: note = ATaRI peptide
SLDSPGKQVRWTAGTWDEPGAWNLQEISCLLLSLEYPSLSYPLPSWLWESSPYFKITLRDIEPKDPG

SEQ ID NO: 3558 - protein, 18 aa, synthetic construct
  REGION 1..18: note = ATaRI peptide
DLIRRQIKVSSPDFCTRS

SEQ ID NO: 3559 - protein, 9 aa, synthetic construct
  REGION 1..9: note = ATaRI peptide
SAAEDGLIR

SEQ ID NO: 3560 - protein, 9 aa, synthetic construct
  REGION 1..9: note = ATaRI peptide
AAAYMKRKW

SEQ ID NO: 3561 - protein, 41 aa, synthetic construct
  REGION 1..41: note = ATaRI peptide
RLWNPRPEVRVQSQAERRAGTLWKAPVEPASAGKRNEPPRG

SEQ ID NO: 3562 - protein, 29 aa, synthetic construct
  REGION 1..29: note = ATaRI peptide
WTARFCSWVSLGMWAQWAEAWGWEEDIRA

SEQ ID NO: 3563 - protein, 9 aa, synthetic construct
  REGION 1..9: note = ATaRI peptide
CRTEYQQER

SEQ ID NO: 3564 - protein, 12 aa, synthetic construct
  REGION 1..12: note = ATaRI peptide
MILEKEKKVWFS

SEQ ID NO: 3565 - protein, 10 aa, synthetic construct
  REGION 1..10: note = ATaRI peptide
VFLIDLNSSK

SEQ ID NO: 3566 - protein, 59 aa, synthetic construct
  REGION 1..59: note = ATaRI peptide
PEEETELDVIPCLCHCFVFGDPGFWSIQLFYVAGNASDLAAGGSLESSNGPLAIWCGQL

SEQ ID NO: 3567 - protein, 13 aa, synthetic construct
  REGION 1..13: note = ATaRI peptide
EDDEIINPGEVSC

SEQ ID NO: 3568 - protein, 12 aa, synthetic construct
  REGION 1..12: note = ATaRI peptide
QTAVVPVKVGST

SEQ ID NO: 3569 - protein, 25 aa, synthetic construct
  REGION 1..25: note = ATaRI peptide
VGDSGPGEVSGGRATPLFPGTPNRV

SEQ ID NO: 3570 - protein, 28 aa, synthetic construct
  REGION 1..28: note = ATaRI peptide
SAFIPVEEVSLEGVRDLWSLGRKDMAYW

SEQ ID NO: 3571 - protein, 9 aa, synthetic construct
  REGION 1..9: note = ATaRI peptide
YIHCVFGIR

SEQ ID NO: 3572 - protein, 52 aa, synthetic construct
  REGION 1..52: note = ATaRI peptide
FSREPWNSRWSAKLHCVPSCFFLVAFLLVFFFFLSLNSWPRLGSPFSAIKTN

SEQ ID NO: 3573 - protein, 9 aa, synthetic construct
  REGION 1..9: note = ATaRI peptide
PITIEMLKV

SEQ ID NO: 3574 - protein, 41 aa, synthetic construct
  REGION 1..41: note = ATaRI peptide
IKRRLTRKVLLPVCSVNYMCYIWMAYLIGNEFTAGHSGLRL

SEQ ID NO: 3575 - protein, 92 aa, synthetic construct
  REGION 1..92: note = ATaRI peptide
PPDQKTRPGGSAPGAPSVLPARAPQRWPHPRGRGWAPLAARGCGLGGRLWPTESPGRAPPANAAVRSSSRPSCLSTGWWREESVSAVDLPGS

SEQ ID NO: 3576 - protein, 9 aa, synthetic construct
  REGION 1..9: note = ATaRI peptide
IRLGGIMLR

SEQ ID NO: 3577 - protein, 11 aa, synthetic construct
  REGION 1..11: note = ATaRI peptide
VQTPTSADGRG

SEQ ID NO: 3578 - protein, 30 aa, synthetic construct
  REGION 1..30: note = ATaRI peptide
IQAPFQVTGKCTNPNSSSDLLNTHLRRQVL

SEQ ID NO: 3579 - protein, 25 aa, synthetic construct
  REGION 1..25: note = ATaRI peptide
TVYECVVEVSMFSFPTIRTLTGGFI

SEQ ID NO: 3580 - protein, 9 aa, synthetic construct
  REGION 1..9: note = ATaRI peptide
AQLTEDITR

SEQ ID NO: 3581 - protein, 69 aa, synthetic construct
  REGION 1..69: note = ATaRI peptide
FKTRLGNMVKSRLHRKYKKLVRHGGTCLWWSQLLRRLRWEDCLSPGGRGCSEPRLHHCTPAWVTVETLS

SEQ ID NO: 3582 - protein, 19 aa, synthetic construct
  REGION 1..19: note = ATaRI peptide
CVEHHTFFRYYSHLSIFQG

SEQ ID NO: 3583 - protein, 33 aa, synthetic construct
  REGION 1..33: note = ATaRI peptide
EDLIRMRKVSHFSLSQNYIAISPMLTYSALKRQ

SEQ ID NO: 3584 - protein, 13 aa, synthetic construct
  REGION 1..13: note = ATaRI peptide
ERKVGGPEVKLLL

SEQ ID NO: 3585 - protein, 9 aa, synthetic construct
  REGION 1..9: note = ATaRI peptide
AIIVIIRKG

SEQ ID NO: 3586 - protein, 76 aa, synthetic construct
  REGION 1..76: note = ATaRI peptide
IKIRINREVSISLPFSSSSSSSCLSDWLYLRLSHGLWLSVSLSLSFLSTYVPSTNRPFQQPGQGLPRAEDSRVFLL

SEQ ID NO: 3587 - protein, 19 aa, synthetic construct
  REGION 1..19: note = ATaRI peptide
FWKKEAAQCEFSLPCFLAK

SEQ ID NO: 3588 - protein, 107 aa, synthetic construct
  REGION 1..107: note = ATaRI peptide
LIDGKLILVRWATLELYLIGYYYCSFSQACSKKPSPPLRAVEAGTREWLWVRVVSGGNFLCSGFGLTQAGTQILPYRLHDCGQITFSKCNCKTGINNTNLVGLLGSL

SEQ ID NO: 3589 - protein, 11 aa, synthetic construct
  REGION 1..11: note = ATaRI peptide
LQLGDPVQGMQ

SEQ ID NO: 3590 - protein, 53 aa, synthetic construct
  REGION 1..53: note = ATaRI peptide
DVSHFRFHVSLLPGEGGLGPERVGGSAGQECDVIARESYFQYFPNPKEDSAHM

SEQ ID NO: 3591 - protein, 10 aa, synthetic construct
  REGION 1..10: note = ATaRI peptide
RKQKREQQVS

SEQ ID NO: 3592 - protein, 24 aa, synthetic construct
  REGION 1..24: note = ATaRI peptide
SYVSSTTGVRPLHVPQADLENTCF

SEQ ID NO: 3593 - protein, 35 aa, synthetic construct
  REGION 1..35: note = ATaRI peptide
RNENCTLQVRPEGKGFVLSFNFWGIHSRYIYLWDT

SEQ ID NO: 3594 - protein, 44 aa, synthetic construct
  REGION 1..44: note = ATaRI peptide
DFEDVQEQVMLRFGVILYSTCGIIKNIFGLCPGSWHSVKTLGIS

SEQ ID NO: 3595 - protein, 9 aa, synthetic construct
  REGION 1..9: note = ATaRI peptide
CSILNPLLT

SEQ ID NO: 3596 - protein, 17 aa, synthetic construct
  REGION 1..17: note = ATaRI peptide
SGGTPEQIRYYIPFPLS

SEQ ID NO: 3597 - protein, 21 aa, synthetic construct
  REGION 1..21: note = ATaRI peptide
EQYELREEVRVSRTAVMAQKL

SEQ ID NO: 3598 - protein, 28 aa, synthetic construct
  REGION 1..28: note = ATaRI peptide
ALDTEIPNGNSCRARFGWAGWELELICP

SEQ ID NO: 3599 - protein, 11 aa, synthetic construct
  REGION 1..11: note = ATaRI peptide
NIMQVWQMVRV

SEQ ID NO: 3600 - protein, 9 aa, synthetic construct
  REGION 1..9: note = ATaRI peptide
WLFPPHQTK

SEQ ID NO: 3601 - protein, 9 aa, synthetic construct
  REGION 1..9: note = ATaRI peptide
IPVLQTKTR

SEQ ID NO: 3602 - protein, 9 aa, synthetic construct
  REGION 1..9: note = ATaRI peptide
QHPSDLTTR

SEQ ID NO: 3603 - protein, 19 aa, synthetic construct
  REGION 1..19: note = ATaRI peptide
RPATSTVTGRPSGRGRRGR

SEQ ID NO: 3604 - protein, 22 aa, synthetic construct
  REGION 1..22: note = ATaRI peptide
DCGNSVCLGKETYPLKVMLSCF

SEQ ID NO: 3605 - protein, 9 aa, synthetic construct
  REGION 1..9: note = ATaRI peptide
LRQNPTMLK

SEQ ID NO: 3606 - protein, 13 aa, synthetic construct
  REGION 1..13: note = ATaRI peptide
INAVFSESGNRII

SEQ ID NO: 3607 - protein, 25 aa, synthetic construct
  REGION 1..25: note = ATaRI peptide
YSCVVAFQVWLQEPSSSSVSESPTV

SEQ ID NO: 3608 - protein, 30 aa, synthetic construct
  REGION 1..30: note = ATaRI peptide
ADKSFCSEGKDRRLSYLLSMLVVLKQLMMI

SEQ ID NO: 3609 - protein, 15 aa, synthetic construct
  REGION 1..15: note = ATaRI peptide
DPPSQNNAGKINLRY

SEQ ID NO: 3610 - protein, 31 aa, synthetic construct
  REGION 1..31: note = ATaRI peptide
ESSEPGCRGKICFSPFGMNYLYYYCGFKFVN

SEQ ID NO: 3611 - protein, 18 aa, synthetic construct
  REGION 1..18: note = ATaRI peptide
WEPTILPNGRVIFFLLFS

SEQ ID NO: 3612 - protein, 18 aa, synthetic construct
  REGION 1..18: note = ATaRI peptide
ARLLSTSPGKNWGSSPDG

SEQ ID NO: 3613 - protein, 13 aa, synthetic construct
  REGION 1..13: note = ATaRI peptide
VKFTKEIRGKCLH

SEQ ID NO: 3614 - protein, 51 aa, synthetic construct
  REGION 1..51: note = ATaRI peptide
KHTYLPLEVRLPSNGWGIGIVYTCMLIIRCLFFHFEVWKTDILRRYEVVLL

SEQ ID NO: 3615 - protein, 9 aa, synthetic construct
  REGION 1..9: note = ATaRI peptide
KQCREEVLK

SEQ ID NO: 3616 - protein, 46 aa, synthetic construct
  REGION 1..46: note = ATaRI peptide
VPEGQLPQVGPTVGGENLHIMAGKLGATTFSKLLALRGVSLLSELC

SEQ ID NO: 3617 - protein, 47 aa, synthetic construct
  REGION 1..47: note = ATaRI peptide
VLRHLPSMKWVLLLFFSLDFKLPRMNCAGFPWLNLYLSYILIVQLKC

SEQ ID NO: 3618 - protein, 9 aa, synthetic construct
  REGION 1..9: note = ATaRI peptide
NNILVPHQR

SEQ ID NO: 3619 - protein, 9 aa, synthetic construct
  REGION 1..9: note = ATaRI peptide
QFPPKSLNK

SEQ ID NO: 3620 - protein, 9 aa, synthetic construct
  REGION 1..9: note = ATaRI peptide
DSFDEDLAR

SEQ ID NO: 3621 - protein, 68 aa, synthetic construct
  REGION 1..68: note = ATaRI peptide
VTIVHHVKGESRPWPASGSCSTLRRRMNDGWIRSFGGPCISSKGPLKLGAGLKEIPFKKQFPYFNCRA

SEQ ID NO: 3622 - protein, 9 aa, synthetic construct
  REGION 1..9: note = ATaRI peptide
NKKSPEIHR

SEQ ID NO: 3623 - protein, 71 aa, synthetic construct
  REGION 1..71: note = ATaRI peptide
GGRARGTFVRPSPLPLSLRPLLLPALITFHQNTSFVAFDISNPIQRPWNLWFSFPHFLAFPFFVTFLFIIT

SEQ ID NO: 3624 - protein, 39 aa, synthetic construct
  REGION 1..39: note = ATaRI peptide
PRPDVPITGEWCLWRWDGLTAPAALVLPKRDPLGVTYNF

SEQ ID NO: 3625 - protein, 16 aa, synthetic construct
  REGION 1..16: note = ATaRI peptide
LMYSFVNDKYVPSQRP

SEQ ID NO: 3626 - protein, 46 aa, synthetic construct
  REGION 1..46: note = ATaRI peptide
REHRERSQVGPYRPHKCWPLSPCVTLAPTLSPPWDPGPNCIVYKCT

SEQ ID NO: 3627 - protein, 17 aa, synthetic construct
  REGION 1..17: note = ATaRI peptide
VTNQTGLKVIFSVVLHM

SEQ ID NO: 3628 - protein, 43 aa, synthetic construct
  REGION 1..43: note = ATaRI peptide
IQTRKDLMVRRESLRPLFFFFPLFFLVKVLTQTRFQLCVNQPQ

SEQ ID NO: 3629 - protein, 59 aa, synthetic construct
  REGION 1..59: note = ATaRI peptide
PPESLGLQVLATMPGWLILWNQHEQKSQQAGVFHSRTSSMALTNGQDGKLHSFKLRCIP

SEQ ID NO: 3630 - protein, 13 aa, synthetic construct
  REGION 1..13: note = ATaRI peptide
QILNTKLAGRPRQ

SEQ ID NO: 3631 - protein, 24 aa, synthetic construct
  REGION 1..24: note = ATaRI peptide
GGEGISATVKEHFPRRPSDFDSFG

SEQ ID NO: 3632 - protein, 15 aa, synthetic construct
  REGION 1..15: note = ATaRI peptide
EELYKLLEVSELILC

SEQ ID NO: 3633 - protein, 13 aa, synthetic construct
  REGION 1..13: note = ATaRI peptide
SAKRNYFSVSLAQ

SEQ ID NO: 3634 - protein, 71 aa, synthetic construct
  REGION 1..71: note = ATaRI peptide
HPAKQTVEVCDLRMCEGQMLRGCCYKSIQIRDFVPLKDLEEVSGNICLGSSLFSFLTVPMSLKSLQTFLLV

SEQ ID NO: 3635 - protein, 33 aa, synthetic construct
  REGION 1..33: note = ATaRI peptide
VQTWNLEKVIMKTLPQAYIPLARFFQKELFSLL

SEQ ID NO: 3636 - protein, 9 aa, synthetic construct
  REGION 1..9: note = ATaRI peptide
GLSTVYLNK

SEQ ID NO: 3637 - protein, 30 aa, synthetic construct
  REGION 1..30: note = ATaRI peptide
SEQLSQQTVSVVVALARRVRNLNFLYHKRK

SEQ ID NO: 3638 - protein, 21 aa, synthetic construct
  REGION 1..21: note = ATaRI peptide
LRRLEEEEVRTVGSKVILKVQ

SEQ ID NO: 3639 - protein, 18 aa, synthetic construct
  REGION 1..18: note = ATaRI peptide
PEPFRATQVSGVLFFFSS

SEQ ID NO: 3640 - protein, 76 aa, synthetic construct
  REGION 1..76: note = ATaRI peptide
NLCLQQYEVNSSTFSLSFELYQFYFPARQTNIHIYLFFFFLRRSLALSPKLECSGTIPAHCNLRLLGSSDSPASAS

SEQ ID NO: 3641 - protein, 45 aa, synthetic construct
  REGION 1..45: note = ATaRI peptide
HRHVQETTGIKQQQYNSTPLIPSMYLYSAICHIVLCKYLWCQARG

SEQ ID NO: 3642 - protein, 23 aa, synthetic construct
  REGION 1..23: note = ATaRI peptide
KAQIQEQKVSENVGTVNCNSRRE

SEQ ID NO: 3643 - protein, 15 aa, synthetic construct
  REGION 1..15: note = ATaRI peptide
QQQIIRHKVGSGYSK

SEQ ID NO: 3644 - protein, 50 aa, synthetic construct
  REGION 1..50: note = ATaRI peptide
HRQHADHLVFMFPFLLVMLFCYFVILIHVSLHLFFFLHYKHFNFILYTSA

SEQ ID NO: 3645 - protein, 42 aa, synthetic construct
  REGION 1..42: note = ATaRI peptide
QALLKQTTGTLKSVSLSTPMVSKTIMYPRKGVPCLSLFFMYI

SEQ ID NO: 3646 - protein, 16 aa, synthetic construct
  REGION 1..16: note = ATaRI peptide
AAIQRSQQVMLIIPLH

SEQ ID NO: 3647 - protein, 14 aa, synthetic construct
  REGION 1..14: note = ATaRI peptide
QLQSTLQQVHVTSK

SEQ ID NO: 3648 - protein, 13 aa, synthetic construct
  REGION 1..13: note = ATaRI peptide
REQLDTHMVIAIF

SEQ ID NO: 3649 - protein, 17 aa, synthetic construct
  REGION 1..17: note = ATaRI peptide
SSKMEERKVQCMIPMFE

SEQ ID NO: 3650 - protein, 27 aa, synthetic construct
  REGION 1..27: note = ATaRI peptide
MNLMDAHKVGVRSGLHWSAVGLLYMTA

SEQ ID NO: 3651 - protein, 12 aa, synthetic construct
  REGION 1..12: note = ATaRI peptide
DALDRLEEVMPC

SEQ ID NO: 3652 - protein, 24 aa, synthetic construct
  REGION 1..24: note = ATaRI peptide
ISKQLCLEVSVLCFVYFFLRSVDF

SEQ ID NO: 3653 - protein, 32 aa, synthetic construct
  REGION 1..32: note = ATaRI peptide
FIDGILASSESSHHSKHGSHLDSLHFVEAVIF

SEQ ID NO: 3654 - protein, 13 aa, synthetic construct
  REGION 1..13: note = ATaRI peptide
LVKNDPCRGKEPF

SEQ ID NO: 3655 - protein, 9 aa, synthetic construct
  REGION 1..9: note = ATaRI peptide
LLVLGRLVL

SEQ ID NO: 3656 - protein, 23 aa, synthetic construct
  REGION 1..23: note = ATaRI peptide
LFTLVVSLVSKIFISFSFAKVPW

SEQ ID NO: 3657 - protein, 30 aa, synthetic construct
  REGION 1..30: note = ATaRI peptide
EEIKAKVKVSYFFLRDSTLVFIHSSCDNSK

SEQ ID NO: 3658 - protein, 37 aa, synthetic construct
  REGION 1..37: note = ATaRI peptide
QWTQEQIQVLSPRVSQLLPYIYVKGIPDEFQSNLAQR

SEQ ID NO: 3659 - protein, 18 aa, synthetic construct
  REGION 1..18: note = ATaRI peptide
TFRRPQIDPYLFWSNLEG

SEQ ID NO: 3660 - protein, 22 aa, synthetic construct
  REGION 1..22: note = ATaRI peptide
PVMDLLGLGKSWTFQLPCSYKF

SEQ ID NO: 3661 - protein, 18 aa, synthetic construct
  REGION 1..18: note = ATaRI peptide
LQKMISFQVRYPSIHPVV

SEQ ID NO: 3662 - protein, 22 aa, synthetic construct
  REGION 1..22: note = ATaRI peptide
MKLDEDVKVNSHSFLLFLIEAK

SEQ ID NO: 3663 - protein, 30 aa, synthetic construct
  REGION 1..30: note = ATaRI peptide
IHVSLVPQVSKTLKVLLWGRWRGGRKGKPE

SEQ ID NO: 3664 - protein, 46 aa, synthetic construct
  REGION 1..46: note = ATaRI peptide
SRNVLGWQGKRALRHSFNSRLCISGGYEACCRLGDQELWRRAGLGS

SEQ ID NO: 3665 - protein, 83 aa, synthetic construct
  REGION 1..83: note = ATaRI peptide
FQTKNSVMSKSCLTLAQPLALRAQDACLRVMLWLRGAGWLFLVSFLLLKFILSSLIHTLLGCTVIAIEAVWVLERTLAVQSDS

SEQ ID NO: 3666 - protein, 9 aa, synthetic construct
  REGION 1..9: note = ATaRI peptide
WTISSIQSR

SEQ ID NO: 3667 - protein, 14 aa, synthetic construct
  REGION 1..14: note = ATaRI peptide
FDVVEGEKVRMLFV

SEQ ID NO: 3668 - protein, 21 aa, synthetic construct
  REGION 1..21: note = ATaRI peptide
AYHLYHHPGKQAWMAIHLWQS

SEQ ID NO: 3669 - protein, 24 aa, synthetic construct
  REGION 1..24: note = ATaRI peptide
QQYDPQSQVCKRESGQRQLRKRSS

SEQ ID NO: 3670 - protein, 12 aa, synthetic construct
  REGION 1..12: note = ATaRI peptide
TVACSFVQVRTF

SEQ ID NO: 3671 - protein, 14 aa, synthetic construct
  REGION 1..14: note = ATaRI peptide
IPPGSTTPVSSSEV

SEQ ID NO: 3672 - protein, 22 aa, synthetic construct
  REGION 1..22: note = ATaRI peptide
KPLDKLLIRLVQRCGRAWLSRV

SEQ ID NO: 3673 - protein, 47 aa, synthetic construct
  REGION 1..47: note = ATaRI peptide
EICREVNQVRGRTLQTRTHRADENQISKNLIFRGYWSISESIIMESF

SEQ ID NO: 3674 - protein, 24 aa, synthetic construct
  REGION 1..24: note = ATaRI peptide
RRSFWDMLVMEEVVKWASTFLPAS

SEQ ID NO: 3675 - protein, 31 aa, synthetic construct
  REGION 1..31: note = ATaRI peptide
ATAQVTVKGECGRCCNQCPPCHLGGPGGGRM

SEQ ID NO: 3676 - protein, 68 aa, synthetic construct
  REGION 1..68: note = ATaRI peptide
RPEESEDYVSNRCANADKTWVKLGSWDAPPLPPFLLACTAKIHRALATSGENWRLDTSTELSSDWHFL

SEQ ID NO: 3677 - protein, 36 aa, synthetic construct
  REGION 1..36: note = ATaRI peptide
RRLNYQTPGRALLWPVCPQPRPSRPVGLFCRSQGRH

SEQ ID NO: 3678 - protein, 51 aa, synthetic construct
  REGION 1..51: note = ATaRI peptide
PVPQGPNPVGDICPRQRHLSLPSPQPPPVGMSLSLFNSVGNVVIVLPAPWA

SEQ ID NO: 3679 - protein, 9 aa, synthetic construct
  REGION 1..9: note = ATaRI peptide
SLVNNPRYR

SEQ ID NO: 3680 - protein, 16 aa, synthetic construct
  REGION 1..16: note = ATaRI peptide
DLVCEALQVGAAGQAW

SEQ ID NO: 3681 - protein, 9 aa, synthetic construct
  REGION 1..9: note = ATaRI peptide
RSRPSWLTR

SEQ ID NO: 3682 - protein, 14 aa, synthetic construct
  REGION 1..14: note = ATaRI peptide
SVRPAVLQVRTASR

SEQ ID NO: 3683 - protein, 11 aa, synthetic construct
  REGION 1..11: note = ATaRI peptide
NDSVLENKVCC

SEQ ID NO: 3684 - protein, 16 aa, synthetic construct
  REGION 1..16: note = ATaRI peptide
RSFLKHLQRLVCSADI

SEQ ID NO: 3685 - protein, 16 aa, synthetic construct
  REGION 1..16: note = ATaRI peptide
GNLASSLSGKYLILLF

SEQ ID NO: 3686 - protein, 48 aa, synthetic construct
  REGION 1..48: note = ATaRI peptide
NTPSSTVSVSSQICGHTSFTLRKYFPLGYLVSQNGSQLFLQSQTQRGC

SEQ ID NO: 3687 - protein, 12 aa, synthetic construct
  REGION 1..12: note = ATaRI peptide
PARLLECLVSGL

SEQ ID NO: 3688 - protein, 33 aa, synthetic construct
  REGION 1..33: note = ATaRI peptide
VHRDLKPDKYVHSLCPLSRVSLLGLQIKCWQAQ

SEQ ID NO: 3689 - protein, 46 aa, synthetic construct
  REGION 1..46: note = ATaRI peptide
VLFTYVGKVRPAKASPSLGKVRPAKASPSLSPPSVRTGCGENLAWS

SEQ ID NO: 3690 - protein, 15 aa, synthetic construct
  REGION 1..15: note = ATaRI peptide
PPLPFREEVSRAGWA

SEQ ID NO: 3691 - protein, 21 aa, synthetic construct
  REGION 1..21: note = ATaRI peptide
DASKSVDEVSVPSLSLKKYVK

SEQ ID NO: 3692 - protein, 20 aa, synthetic construct
  REGION 1..20: note = ATaRI peptide
MDLEGLRCRLVLREVGKTSQ

SEQ ID NO: 3693 - protein, 9 aa, synthetic construct
  REGION 1..9: note = ATaRI peptide
VRNSYQTYK

SEQ ID NO: 3694 - protein, 11 aa, synthetic construct
  REGION 1..11: note = ATaRI peptide
QILIEQLKVWH

SEQ ID NO: 3695 - protein, 16 aa, synthetic construct
  REGION 1..16: note = ATaRI peptide
ETLKETTNVSYMFDTF

SEQ ID NO: 3696 - protein, 29 aa, synthetic construct
  REGION 1..29: note = ATaRI peptide
EQVSHHPPSKLQSSSATCALKTILSKEGH

SEQ ID NO: 3697 - protein, 14 aa, synthetic construct
  REGION 1..14: note = ATaRI peptide
LDEFEQNEGENLYW

SEQ ID NO: 3698 - protein, 28 aa, synthetic construct
  REGION 1..28: note = ATaRI peptide
VLKHPGAEGRGSCAILSLFPHEVPLKRC

SEQ ID NO: 3699 - protein, 11 aa, synthetic construct
  REGION 1..11: note = ATaRI peptide
LSMVKIVNCKL

SEQ ID NO: 3700 - protein, 10 aa, synthetic construct
  REGION 1..10: note = ATaRI peptide
LRLGAEYRRK

SEQ ID NO: 3701 - protein, 9 aa, synthetic construct
  REGION 1..9: note = ATaRI peptide
DDDKNVSKG

SEQ ID NO: 3702 - protein, 15 aa, synthetic construct
  REGION 1..15: note = ATaRI peptide
KTKPEILKVRIRNWI

SEQ ID NO: 3703 - protein, 9 aa, synthetic construct
  REGION 1..9: note = ATaRI peptide
NHKHSVNNP

SEQ ID NO: 3704 - protein, 9 aa, synthetic construct
  REGION 1..9: note = ATaRI peptide
DFLTILQCW

SEQ ID NO: 3705 - protein, 17 aa, synthetic construct
  REGION 1..17: note = ATaRI peptide
KTEGWADQVLQIFLPCG

SEQ ID NO: 3706 - protein, 15 aa, synthetic construct
  REGION 1..15: note = ATaRI peptide
PRAAAQRFCEKFPFL

SEQ ID NO: 3707 - protein, 17 aa, synthetic construct
  REGION 1..17: note = ATaRI peptide
EVLKSTRIGIFLLNFIF

SEQ ID NO: 3708 - protein, 10 aa, synthetic construct
  REGION 1..10: note = ATaRI peptide
VIKKRVVVVS

SEQ ID NO: 3709 - protein, 9 aa, synthetic construct
  REGION 1..9: note = ATaRI peptide
KRATIKDIR

SEQ ID NO: 3710 - protein, 15 aa, synthetic construct
  REGION 1..15: note = ATaRI peptide
LLDFKSIDGKEAMHA

SEQ ID NO: 3711 - protein, 43 aa, synthetic construct
  REGION 1..43: note = ATaRI peptide
LSSSSLLQVGDTRGKQNCMLCPSTSPPIFFVSSAQGFSQSEKQ

SEQ ID NO: 3712 - protein, 10 aa, synthetic construct
  REGION 1..10: note = ATaRI peptide
AINCEKKQGK

SEQ ID NO: 3713 - protein, 15 aa, synthetic construct
  REGION 1..15: note = ATaRI peptide
RCEELDMQVREKTLS

SEQ ID NO: 3714 - protein, 9 aa, synthetic construct
  REGION 1..9: note = ATaRI peptide
EQLQEENFR

SEQ ID NO: 3715 - protein, 55 aa, synthetic construct [sequence omitted]

SEQ ID NO: 3716 - protein, 30 aa, synthetic construct
  REGION 1..30: note = ATaRI peptide
RPVITGPRGELLHRHPWLCLYHGLWTQVAK

SEQ ID NO: 3717 - protein, 17 aa, synthetic construct
  REGION 1..17: note = ATaRI peptide
NIQALEKLGRHKAFTLR

SEQ ID NO: 3718 - protein, 10 aa, synthetic construct
  REGION 1..10: note = ATaRI peptide
LGPDYEVMVC

SEQ ID NO: 3719 - protein, 36 aa, synthetic construct
  REGION 1..36: note = ATaRI peptide
QPEDELLEVKFMGKERHRQESVSFRKTCSHHKSPEL

SEQ ID NO: 3720 - protein, 39 aa, synthetic construct
  REGION 1..39: note = ATaRI peptide
FSHWGPPRMYVDDIIVAFSIGAQPVALFFNLTEHYLVLL

SEQ ID NO: 3721 - protein, 9 aa, synthetic construct
  REGION 1..9: note = ATaRI peptide
AAAASGANT

SEQ ID NO: 3722 - protein, 11 aa, synthetic construct
  REGION 1..11: note = ATaRI peptide
ETVATILKVSC

SEQ ID NO: 3723 - protein, 9 aa, synthetic construct
  REGION 1..9: note = ATaRI peptide
SRNNAASAR

SEQ ID NO: 3724 - protein, 9 aa, synthetic construct
  REGION 1..9: note = ATaRI peptide
NEVKPINKG

SEQ ID NO: 3725 - protein, 9 aa, synthetic construct
  REGION 1..9: note = ATaRI peptide
KCFAASGLE

SEQ ID NO: 3726 - protein, 54 aa, synthetic construct
  REGION 1..54: note = ATaRI peptide
LILHFLGRGKSNFCFCFVLFCFFVVDIFPFEFQLTNCMKFPEVNFLTVRFSKEL

SEQ ID NO: 3727 - protein, 9 aa, synthetic construct
  REGION 1..9: note = ATaRI peptide
PAVVAHILR

SEQ ID NO: 3728 - protein, 64 aa, synthetic construct
  REGION 1..64: note = ATaRI peptide
TFNLPVKQWYDNFNLFFLFIIVNTDCLKILKGQHAIFFILNILISCMLVPHMYCLAFCRPVFEI

SEQ ID NO: 3729 - protein, 19 aa, synthetic construct
  REGION 1..19: note = ATaRI peptide
HKLFMRTTGKRAMGSEYKI

SEQ ID NO: 3730 - protein, 9 aa, synthetic construct
  REGION 1..9: note = ATaRI peptide
PRHIQLIMR

SEQ ID NO: 3731 - protein, 44 aa, synthetic construct
  REGION 1..44: note = ATaRI peptide
IKFNISNGGEFAVILRTGKFTFSRTNQYLEPWETRVLVLILCRG

SEQ ID NO: 3732 - protein, 9 aa, synthetic construct
  REGION 1..9: note = ATaRI peptide
MPTSGALDR

SEQ ID NO: 3733 - protein, 61 aa, synthetic construct
  REGION 1..61: note = ATaRI peptide
AKINQDPQVTPSPVPWLVLSVQGNDSFPLSLCFNAHFSNDSTRYQLCLLSSMFLSPCQHYR

SEQ ID NO: 3734 - protein, 9 aa, synthetic construct
  REGION 1..9: note = ATaRI peptide
CTIPPSMME

SEQ ID NO: 3735 - protein, 40 aa, synthetic construct
  REGION 1..40: note = ATaRI peptide
KGSYEHRSRYVDLHAKVFNYCLRVIYMKYKTSHFYSWLCL

SEQ ID NO: 3736 - protein, 19 aa, synthetic construct
  REGION 1..19: note = ATaRI peptide
NNNTKFQASECVLSEDLEA

SEQ ID NO: 3737 - protein, 10 aa, synthetic construct
  REGION 1..10: note = ATaRI peptide
ILTYALMNGR

SEQ ID NO: 3738 - protein, 12 aa, synthetic construct
  REGION 1..12: note = ATaRI peptide
PFSDEMGDGEFG

SEQ ID NO: 3739 - protein, 23 aa, synthetic construct
  REGION 1..23: note = ATaRI peptide
YTFLIDDKGNLLNVHPKNTFLET

SEQ ID NO: 3740 - protein, 46 aa, synthetic construct
  REGION 1..46: note = ATaRI peptide
NVSYAWKMVSERKLCLLEELQGTVLFFMLEFSARGWHLGLIICLVM

SEQ ID NO: 3741 - protein, 20 aa, synthetic construct
  REGION 1..20: note = ATaRI peptide
HFKQLATLGKALTLPSHSYS

SEQ ID NO: 3742 - protein, 9 aa, synthetic construct
  REGION 1..9: note = ATaRI peptide
ISHTIHSSR

SEQ ID NO: 3743 - protein, 10 aa, synthetic construct
  REGION 1..10: note = ATaRI peptide
YKFNTSLAVS

SEQ ID NO: 3744 - protein, 9 aa, synthetic construct
  REGION 1..9: note = ATaRI peptide
RCSQRLESG

SEQ ID NO: 3745 - protein, 32 aa, synthetic construct
  REGION 1..32: note = ATaRI peptide
YVDDMGAIGMFVRCPNNLILEYTISCLYARTS

SEQ ID NO: 3746 - protein, 11 aa, synthetic construct
  REGION 1..11: note = ATaRI peptide
RSGTESDHGKV

SEQ ID NO: 3747 - protein, 16 aa, synthetic construct
  REGION 1..16: note = ATaRI peptide
YVDRNKRTGKISILSV

SEQ ID NO: 3748 - protein, 39 aa, synthetic construct
  REGION 1..39: note = ATaRI peptide
VHKPVFCQVCIFKRLLKYFKIYTYVSNLHTLTNLSYLCD

SEQ ID NO: 3749 - protein, 18 aa, synthetic construct
  REGION 1..18: note = ATaRI peptide
ALIAAQRVVSFFSFCLFF

SEQ ID NO: 3750 - protein, 10 aa, synthetic construct
  REGION 1..10: note = ATaRI peptide
HHHGEAHKSK

SEQ ID NO: 3751 - protein, 44 aa, synthetic construct
  REGION 1..44: note = ATaRI peptide
KGTEISSGVRKLWVHTDVYIHVYVYIFLLNYVLNCRVNEMMTFS

SEQ ID NO: 3752 - protein, 9 aa, synthetic construct
  REGION 1..9: note = ATaRI peptide
AKPVIELYK

SEQ ID NO: 3753 - protein, 24 aa, synthetic construct
  REGION 1..24: note = ATaRI peptide
STLQLRYHRYVLFLLFCFSVGTVR

SEQ ID NO: 3754 - protein, 26 aa, synthetic construct
  REGION 1..26: note = ATaRI peptide
TCVLPDSVGMSSCVVSSFVLADLYAD

SEQ ID NO: 3755 - protein, 28 aa, synthetic construct
  REGION 1..28: note = ATaRI peptide
KIINSFTQGKNYNFSFLLHQCVCLICLQ

SEQ ID NO: 3756 - protein, 12 aa, synthetic construct
  REGION 1..12: note = ATaRI peptide
GTLLISHQRYCT

SEQ ID NO: 3757 - protein, 20 aa, synthetic construct
  REGION 1..20: note = ATaRI peptide
QLQGGSNEVLCPGCWDWGDK

SEQ ID NO: 3758 - protein, 11 aa, synthetic construct
  REGION 1..11: note = ATaRI peptide
GYIPYPKEVIF

SEQ ID NO: 3759 - protein, 46 aa, synthetic construct
  REGION 1..46: note = ATaRI peptide
FAFQDPTQVGGHCTFRLVTSSLRCLPAAGGSGGGGMCGKSQGQELQ

SEQ ID NO: 3760 - protein, 12 aa, synthetic construct
  REGION 1..12: note = ATaRI peptide
AWHSPGARGMCP

SEQ ID NO: 3761 - protein, 24 aa, synthetic construct
  REGION 1..24: note = ATaRI peptide
ASSSQKEKVSAPGQVLECLNYAVG

SEQ ID NO: 3762 - protein, 15 aa, synthetic construct
  REGION 1..15: note = ATaRI peptide
SHIKDNEQVCERNNC

SEQ ID NO: 3763 - protein, 17 aa, synthetic construct
  REGION 1..17: note = ATaRI peptide
RFNVKAARGKYSFYSFS

SEQ ID NO: 3764 - protein, 27 aa, synthetic construct
  REGION 1..27: note = ATaRI peptide
TVSTANQNGKQPEKHFSFFIIRDTFLQ

SEQ ID NO: 3765 - protein, 15 aa, synthetic construct
  REGION 1..15: note = ATaRI peptide
PTPNPLTQVLVLLNS

SEQ ID NO: 3766 - protein, 37 aa, synthetic construct
  REGION 1..37: note = ATaRI peptide
PGANLNSQVYLSNFKFFTHFYRRSVSLTVGLHFKSRS

SEQ ID NO: 3767 - protein, 18 aa, synthetic construct
  REGION 1..18: note = ATaRI peptide
TFMSPYFQVNENNFFWHN

SEQ ID NO: 3768 - protein, 13 aa, synthetic construct
  REGION 1..13: note = ATaRI peptide
KLCVKDDVVSFKK

SEQ ID NO: 3769 - protein, 127 aa, synthetic construct
  REGION 1..127: note = ATaRI peptide
RCYRKYKQVNLSFAPQKETVPHPRPLKILVWLKSTTSSTSLQRLNLFFGCFFFFIFFLKRSLAVSPRLECSGMIWAHCNLHLPGSSDSPASASRVAGTTGVCYHAQLIFLVLVESGFHHVARLVLNS

SEQ ID NO: 3770 - protein, 28 aa, synthetic construct
  REGION 1..28: note = ATaRI peptide
GSAQSLASVSTEKILIFKIFVYMSSVIY

SEQ ID NO: 3771 - protein, 58 aa, synthetic construct
  REGION 1..58: note = ATaRI peptide
AIAEENVDVRVIDLSGLHNIRRIKLFFCFFGRGRVSLLLPRLSLELLGSSDLPALSSE

SEQ ID NO: 3772 - protein, 41 aa, synthetic construct
  REGION 1..41: note = ATaRI peptide
LRCVHSVQGKQAGEKFHPTNAPGLIQAARGVVSGVSVRQII

SEQ ID NO: 3773 - protein, 20 aa, synthetic construct
  REGION 1..20: note = ATaRI peptide
YDLCCFFKVCSVIESFLFFF

SEQ ID NO: 3774 - protein, 44 aa, synthetic construct
  REGION 1..44: note = ATaRI peptide
EKIHSGYEGKSVDKMQKCQQSDRNMGKSVYVSHRTTKRALGSPI

SEQ ID NO: 3775 - protein, 10 aa, synthetic construct
  REGION 1..10: note = ATaRI peptide
QIYKLLLQVR

SEQ ID NO: 3776 - protein, 24 aa, synthetic construct
  REGION 1..24: note = ATaRI peptide
VTQEIDIQVSTVIMAVIYSCILAR

SEQ ID NO: 3777 - protein, 12 aa, synthetic construct
  REGION 1..12: note = ATaRI peptide
GNIRDRYQVIFD

SEQ ID NO: 3778 - protein, 25 aa, synthetic construct
  REGION 1..25: note = ATaRI peptide
IRRELVNAGESHSTLLRVIPLRVID

SEQ ID NO: 3779 - protein, 15 aa, synthetic construct
  REGION 1..15: note = ATaRI peptide
WVNQLAQKVGWNLLI

SEQ ID NO: 3780 - protein, 17 aa, synthetic construct
  REGION 1..17: note = ATaRI peptide
ARKSSDASGRKTPFFTE

SEQ ID NO: 3781 - protein, 11 aa, synthetic construct
  REGION 1..11: note = ATaRI peptide
APEIILSKVYS

SEQ ID NO: 3782 - protein, 24 aa, synthetic construct
  REGION 1..24: note = ATaRI peptide
YEKIVSGKVSKTFYYSSLITVYEF

SEQ ID NO: 3783 - protein, 21 aa, synthetic construct
  REGION 1..21: note = ATaRI peptide
EREALGDKVNKIFSCLLSILY

SEQ ID NO: 3784 - protein, 32 aa, synthetic construct
  REGION 1..32: note = ATaRI peptide
INEDRKTPSILFFFKEVFLSSPSPPLKIYLKE

SEQ ID NO: 3785 - protein, 10 aa, synthetic construct
  REGION 1..10: note = ATaRI peptide
EGDYKTIAVS

SEQ ID NO: 3786 - protein, 28 aa, synthetic construct
  REGION 1..28: note = ATaRI peptide
ELSLLADEVSIVGMRRKIYHELTYLLIL

SEQ ID NO: 3787 - protein, 63 aa, synthetic construct
  REGION 1..63: note = ATaRI peptide
NPLLPDQKVNTQQLLISFIRASWKVQPLNLAREFSWVVVFLHALLKKCRLLVVHRVFRSRIAD

SEQ ID NO: 3788 - protein, 24 aa, synthetic construct
  REGION 1..24: note = ATaRI peptide
TNELAFDNGDGINCPPSYEHNGAK

SEQ ID NO: 3789 - protein, 18 aa, synthetic construct
  REGION 1..18: note = ATaRI peptide
LLKTDDLSSSVTRFLKIM

SEQ ID NO: 3790 - protein, 9 aa, synthetic construct
  REGION 1..9: note = ATaRI peptide
LHEHKIVYR

SEQ ID NO: 3791 - protein, 50 aa, synthetic construct
  REGION 1..50: note = ATaRI peptide
ADFGLCKEGNRMFLSFFSDSELLFLCASVVFKFVYGKQTVLLTLFFIKTL

SEQ ID NO: 3792 - protein, 9 aa, synthetic construct
  REGION 1..9: note = ATaRI peptide
SLCHGLRGR

SEQ ID NO: 3793 - protein, 10 aa, synthetic construct
  REGION 1..10: note = ATaRI peptide
KISLSKSPSK

SEQ ID NO: 3794 - protein, 13 aa, synthetic construct
  REGION 1..13: note = ATaRI peptide
KVVMEFLHVSSCF

SEQ ID NO: 3795 - protein, 60 aa, synthetic construct
  REGION 1..60: note = ATaRI peptide
PDHIKGKQVKFSSVLIKLPDYPSIFYCSLAIASHLSAILSIYQSHMEITVSILREAVYSG

SEQ ID NO: 3796 - protein, 35 aa, synthetic construct
  REGION 1..35: note = ATaRI peptide
NEQNFKLAGTCLNPKMYSYKDFSGNNSVFSIPLKK

SEQ ID NO: 3797 - protein, 29 aa, synthetic construct
  REGION 1..29: note = ATaRI peptide
SSSARICSGRRRRELWLLQFLNRPPPPRS

SEQ ID NO: 3798 - protein, 9 aa, synthetic construct
  REGION 1..9: note = ATaRI peptide
ALEFRTFLQ

SEQ ID NO: 3799 - protein, 18 aa, synthetic construct
  REGION 1..18: note = ATaRI peptide
RDDDFISNGEVFFMELYL

SEQ ID NO: 3800 - protein, 9 aa, synthetic construct
  REGION 1..9: note = ATaRI peptide
SQEYVTLQG

SEQ ID NO: 3801 - protein, 30 aa, synthetic construct
  REGION 1..30: note = ATaRI peptide
DYCNFFQKVIIEPQKSFIQCIVTHYYLLDF

SEQ ID NO: 3802 - protein, 36 aa, synthetic construct
  REGION 1..36: note = ATaRI peptide
KPIFSSSQVNFLNFIGTNEKDNKLFKAYYFIFQKKF

SEQ ID NO: 3803 - protein, 31 aa, synthetic construct
  REGION 1..31: note = ATaRI peptide
RYFASEIIVSTANLICYNLKCYPTIFSVLHM

SEQ ID NO: 3804 - protein, 33 aa, synthetic construct
  REGION 1..33: note = ATaRI peptide
VYDITERKVSLKAFIVAINFFSLLTTILTRHGN

SEQ ID NO: 3805 - protein, 9 aa, synthetic construct
  REGION 1..9: note = ATaRI peptide
IVLEKLSKV

SEQ ID NO: 3806 - protein, 37 aa, synthetic construct
  REGION 1..37: note = ATaRI peptide
VDHYLGKQVSISMEPARARVSWALVDPSNKAARSLWS

SEQ ID NO: 3807 - protein, 40 aa, synthetic construct
  REGION 1..40: note = ATaRI peptide
HSLTPTFAGGPWGWAWGTGLPTSPGAAFQMQTPLGGVEGT

SEQ ID NO: 3808 - protein, 24 aa, synthetic construct
  REGION 1..24: note = ATaRI peptide
DKVLDIEKVRNLHKCSHSQIRGDM

SEQ ID NO: 3809 - protein, 9 aa, synthetic construct
  REGION 1..9: note = ATaRI peptide
KYNSKKMKK

SEQ ID NO: 3810 - protein, 9 aa, synthetic construct
  REGION 1..9: note = ATaRI peptide
YCYCGGPGE

SEQ ID NO: 3811 - protein, 9 aa, synthetic construct
  REGION 1..9: note = ATaRI peptide
QKPMLFGDR

SEQ ID NO: 3812 - protein, 25 aa, synthetic construct
  REGION 1..25: note = ATaRI peptide
EKIISQLPVSMCDYVMEKKNFTKVF

SEQ ID NO: 3813 - protein, 18 aa, synthetic construct
  REGION 1..18: note = ATaRI peptide
NSSKLESEVSLELAWYIC

SEQ ID NO: 3814 - protein, 19 aa, synthetic construct
  REGION 1..19: note = ATaRI peptide
AELEQELMVKLIFVPTNLL

SEQ ID NO: 3815 - protein, 18 aa, synthetic construct
  REGION 1..18: note = ATaRI peptide
EMEKQIERVSNTYLEYEC

SEQ ID NO: 3816 - protein, 26 aa, synthetic construct
  REGION 1..26: note = ATaRI peptide
ELKECNKQVNYFKITYFKLFFKKFKL

SEQ ID NO: 3817 - protein, 9 aa, synthetic construct
  REGION 1..9: note = ATaRI peptide
HLTRACHTR

SEQ ID NO: 3818 - protein, 18 aa, synthetic construct
  REGION 1..18: note = ATaRI peptide
DLKTERKMVILTIFIQLQ

SEQ ID NO: 3819 - protein, 12 aa, synthetic construct
  REGION 1..12: note = ATaRI peptide
AKSVDERRVSAK

SEQ ID NO: 3820 - protein, 9 aa, synthetic construct
  REGION 1..9: note = ATaRI peptide
HLVTQGRER

SEQ ID NO: 3821 - protein, 23 aa, synthetic construct
  REGION 1..23: note = ATaRI peptide
CKAIYPFDGMIFLIILYVKKLVL

SEQ ID NO: 3822 - protein, 14 aa, synthetic construct
  REGION 1..14: note = ATaRI peptide
VPRTFCKEVSLMKL

SEQ ID NO: 3823 - protein, 9 aa, synthetic construct
  REGION 1..9: note = ATaRI peptide
GREMTRLAG

SEQ ID NO: 3824 - protein, 9 aa, synthetic construct
  REGION 1..9: note = ATaRI peptide
AVVTCYFNR

SEQ ID NO: 3825 - protein, 39 aa, synthetic construct
  REGION 1..39: note = ATaRI peptide
MQNALKEQVRLPPDTQHVLCLGCQKLNYWKTTAGPRTEM

SEQ ID NO: 3826 - protein, 13 aa, synthetic construct
  REGION 1..13: note = ATaRI peptide
DFIIFLGKVRYLD

SEQ ID NO: 3827 - protein, 90 aa, synthetic construct
  REGION 1..90: note = ATaRI peptide
YFMDQEFLVSKHFISNCNLHARNLESFVKLHTRKRLIPSLSLLEGSEASTTPGPESGICAELSKAEPTSLSENLLPEEVKLNKNADQMDS

SEQ ID NO: 3828 - protein, 47 aa, synthetic construct
  REGION 1..47: note = ATaRI peptide
LFHYIPGTVSAACTVAVVWERGSARACVPCVRAAQGLPLAPGAFRPR

SEQ ID NO: 3829 - protein, 66 aa, synthetic construct
  REGION 1..66: note = ATaRI peptide
MPTSAPSSRYGLHPVLRPWCSERERERETQIDRQTDRQMDRWTDGQTDGQMHCFSDLGSSDENFKR

SEQ ID NO: 3830 - protein, 23 aa, synthetic construct
  REGION 1..23: note = ATaRI peptide
WKETLKVLRYLWCNQLCQFCVNG

SEQ ID NO: 3831 - protein, 21 aa, synthetic construct
  REGION 1..21: note = ATaRI peptide
RLRVAKESGNVSLLSFSYLKK

SEQ ID NO: 3832 - protein, 30 aa, synthetic construct
  REGION 1..30: note = ATaRI peptide
STPLHVAEVQKNNLSTLRKEIQCSFLAFLK

SEQ ID NO: 3833 - protein, 9 aa, synthetic construct
  REGION 1..9: note = ATaRI peptide
PILKIPFAS

SEQ ID NO: 3834 - protein, 14 aa, synthetic construct
  REGION 1..14: note = ATaRI peptide
ALKYAGLQGKQMEG

SEQ ID NO: 3835 - protein, 9 aa, synthetic construct
  REGION 1..9: note = ATaRI peptide
ITGRYVEAR

SEQ ID NO: 3836 - protein, 23 aa, synthetic construct
  REGION 1..23: note = ATaRI peptide
APLPAGTLVKIFLKMFFCFFFFF

SEQ ID NO: 3837 - protein, 22 aa, synthetic construct
  REGION 1..22: note = ATaRI peptide
NFTIAMVVVGDSFVKTFQKMMC

SEQ ID NO: 3838 - protein, 9 aa, synthetic construct
  REGION 1..9: note = ATaRI peptide
SRHYVHLER

SEQ ID NO: 3839 - protein, 19 aa, synthetic construct
  REGION 1..19: note = ATaRI peptide
WFSEQKKEVQQNFLLFNCK

SEQ ID NO: 3840 - protein, 14 aa, synthetic construct
  REGION 1..14: note = ATaRI peptide
SSMILNVLVSLWDT

SEQ ID NO: 3841 - protein, 16 aa, synthetic construct
  REGION 1..16: note = ATaRI peptide
GPIGTSPPGYVVTQVC

SEQ ID NO: 3842 - protein, 20 aa, synthetic construct
  REGION 1..20: note = ATaRI peptide
VASTRHEMGMYIHCFETFCC

SEQ ID NO: 3843 - protein, 25 aa, synthetic construct
  REGION 1..25: note = ATaRI peptide
LILVEGVYRYVNNRTHFTTRRPAAS

SEQ ID NO: 3844 - protein, 9 aa, synthetic construct
  REGION 1..9: note = ATaRI peptide
LLYMPGKVA

SEQ ID NO: 3845 - protein, 20 aa, synthetic construct
  REGION 1..20: note = ATaRI peptide
YIAQYLNKVYLFNDLIYFEK

SEQ ID NO: 3846 - protein, 40 aa, synthetic construct
  REGION 1..40: note = ATaRI peptide
FDLVVSSLRLVIHFLKTICYKQIILAIKFCYEARSGGSRL

SEQ ID NO: 3847 - protein, 39 aa, synthetic construct
  REGION 1..39: note = ATaRI peptide
DLPRALEQVRKLMFIQLSCVIFFIVRNLQMFLFSHTIYL

SEQ ID NO: 3848 - protein, 9 aa, synthetic construct
  REGION 1..9: note = ATaRI peptide
HWTFLLGNR

SEQ ID NO: 3849 - protein, 35 aa, synthetic construct
  REGION 1..35: note = ATaRI peptide
IIEDAGNKGKHVKDEAEKNIVFGTRYRDPDLSFPG

SEQ ID NO: 3850 - protein, 27 aa, synthetic construct
  REGION 1..27: note = ATaRI peptide
IKAVKSVAVSSPFLRYPLTYVASSFYS

SEQ ID NO: 3851 - protein, 17 aa, synthetic construct
  REGION 1..17: note = ATaRI peptide
ICELGISKVRTEFHLIF

SEQ ID NO: 3852 - protein, 10 aa, synthetic construct
  REGION 1..10: note = ATaRI peptide
RAPCGLCPVS

SEQ ID NO: 3853 - protein, 24 aa, synthetic construct
  REGION 1..24: note = ATaRI peptide
VKLFSTHFGMDSFETGKNDKYNIL

SEQ ID NO: 3854 - protein, 52 aa, synthetic construct
  REGION 1..52: note = ATaRI peptide
KGPCVSENVRKTTPSPSPPAPDLTRQKCQSMMISHVSPVGCVCSDRRRANPH

SEQ ID NO: 3855 - protein, 19 aa, synthetic construct
  REGION 1..19: note = ATaRI peptide
IYFEVVNQVSWISSHVFMS

SEQ ID NO: 3856 - protein, 35 aa, synthetic construct
  REGION 1..35: note = ATaRI peptide
LVRIRQKKGGCIPLFLPKGLSLDCPRRETPLGALG

SEQ ID NO: 3857 - protein, 34 aa, synthetic construct
  REGION 1..34: note = ATaRI peptide
YTVMENNSGEAAGSPGFVPLPFRAGDRPLSCQAF

SEQ ID NO: 3858 - protein, 9 aa, synthetic construct
  REGION 1..9: note = ATaRI peptide
QLQHGLRDR

SEQ ID NO: 3859 - protein, 28 aa, synthetic construct
  REGION 1..28: note = ATaRI peptide
LYMAIDGVVSAKIIRSLHFVFFCCVTSV

SEQ ID NO: 3860 - protein, 13 aa, synthetic construct
  REGION 1..13: note = ATaRI peptide
DPGWKNLTVSFTF

SEQ ID NO: 3861 - protein, 12 aa, synthetic construct
  REGION 1..12: note = ATaRI peptide
KEKRKRMKVSFN

SEQ ID NO: 3862 - protein, 17 aa, synthetic construct
  REGION 1..17: note = ATaRI peptide
EMRMQNNSVSGLLLCDI

SEQ ID NO: 3863 - protein, 9 aa, synthetic construct
  REGION 1..9: note = ATaRI peptide
EPEPEDNVR

SEQ ID NO: 3864 - protein, 18 aa, synthetic construct
  REGION 1..18: note = ATaRI peptide
WVLRYYYQVQKEYFPLNL

SEQ ID NO: 3865 - protein, 35 aa, synthetic construct
  REGION 1..35: note = ATaRI peptide
WRKLMSDPVSLSILSVWVTGFLSHFIHISYNCFCS

SEQ ID NO: 3866 - protein, 14 aa, synthetic construct
  REGION 1..14: note = ATaRI peptide
YPDLTPEESKNYTS

SEQ ID NO: 3867 - protein, 9 aa, synthetic construct
  REGION 1..9: note = ATaRI peptide
DEEAILPDQ

SEQ ID NO: 3868 - protein, 45 aa, synthetic construct
  REGION 1..45: note = ATaRI peptide
RDDRGGRQVNGCGMKSILLTLYFNKPHRTPYFLTNISGEDTDRVA

SEQ ID NO: 3869 - protein, 105 aa, synthetic construct
  REGION 1..105: note = ATaRI peptide
RTYKLYSYRSAFGNRRGEAPWGGYAAPRASHGPLEVMDGRSGNPCAGNPPRPLSPPPPSPASSALLLHPLMCLQYTHIHPDLSLLLLLPPPLVLLLHPLSIVYAH

SEQ ID NO: 3870 - protein, 29 aa, synthetic construct
  REGION 1..29: note = ATaRI peptide
NGGLGRLAGKLPHPGGALSDPLAWLEATW

SEQ ID NO: 3871 - protein, 113 aa, synthetic construct
  REGION 1..113: note = ATaRI peptide
QKIVNGWQVGEISFLHWFPALVHTIKWQHLQFVFLYFPRPRQGTAGRPGQCGAGQGSILAPASWSTWPGRAWALCELFASCLCLVTGKLGRAGHRILGEPYSSSQTGPVAAGQ

SEQ ID NO: 3872 - protein, 30 aa, synthetic construct
  REGION 1..30: note = ATaRI peptide
GVKWLDTQVPGLKCLRARLEPGEGAAAAHL

SEQ ID NO: 3873 - protein, 69 aa, synthetic construct
  REGION 1..69: note = ATaRI peptide
RVLYPNDNVSSWPGHSCSGRIAFWHREVGWLAGLPSGACCWPWQAATWWPSRLRCTHDALGEERVHCPP

SEQ ID NO: 3874 - protein, 62 aa, synthetic construct
  REGION 1..62: note = ATaRI peptide
AINQRHLDVSVGPAGRVGWRLHPCQRPPTWPGRGGALLLERGTLCSAEDAWGWGLSLGRAIG

SEQ ID NO: 3875 - protein, 26 aa, synthetic construct
  REGION 1..26: note = ATaRI peptide
RDVAKVKQVGMALAPAPTPALPQPGR

SEQ ID NO: 3876 - protein, 19 aa, synthetic construct
  REGION 1..19: note = ATaRI peptide
PCPEMFTRVLHGSPAQLSL

SEQ ID NO: 3877 - protein, 278 aa, synthetic construct
  REGION 1..278: note = ATaRI peptide
YRVSLAEKGNPGSLCWTENSLLPGNGRCTGPGPFILSQFSSAWTPRPSQPGCRRAGNGFRECSPCSAEDSQCVPGRLACHRQCHPPTGHPYCRACLACPLYPPSPALSSCPSAVPSALGPSAGRTCLACPLYPPSPALSSCPSAVSSALGPSAGRTCTRPVGLWAPSFPQLHCPSSAHILAPHCLPALGPTSDLRWQHLPHLCFLRAAWASPGETLGCAAMCPGAHQFPPLWALLGRKVICPPDGGRSEPGLLVLPSCRRGPRAPPSSGRLGFPGCRR

SEQ ID NO: 3878 - protein, 9 aa, synthetic construct
  REGION 1..9: note = ATaRI peptide
LYEQNQSDV

SEQ ID NO: 3879 - protein, 10 aa, synthetic construct
  REGION 1..10: note = ATaRI peptide
RFHMAAEEVS

SEQ ID NO: 3880 - protein, 12 aa, synthetic construct
  REGION 1..12: note = ATaRI peptide
NRYVNILPCECL

SEQ ID NO: 3881 - protein, 17 aa, synthetic construct
  REGION 1..17: note = ATaRI peptide
KNKFIAAQGKVMTTFFC

SEQ ID NO: 3882 - protein, 26 aa, synthetic construct
  REGION 1..26: note = ATaRI peptide
TNLKERKEVSGKIGCEQQKDHSAYKL

SEQ ID NO: 3883 - protein, 25 aa, synthetic construct
  REGION 1..25: note = ATaRI peptide
VRKFCIQQVVSPLSFLSSYVGSADQ

SEQ ID NO: 3884 - protein, 15 aa, synthetic construct
  REGION 1..15: note = ATaRI peptide
RCQMVQTDVSDLWVR

SEQ ID NO: 3885 - protein, 29 aa, synthetic construct
  REGION 1..29: note = ATaRI peptide
NHPITVHCRYGSPLPSAGERKRGGADRGS

SEQ ID NO: 3886 - protein, 40 aa, synthetic construct
  REGION 1..40: note = ATaRI peptide
LGLYLFFKVSLLPPVVSFDLNDFILFCFIFPITRTMHVHL

SEQ ID NO: 3887 - protein, 9 aa, synthetic construct
  REGION 1..9: note = ATaRI peptide
KGEVTEMFR

SEQ ID NO: 3888 - protein, 22 aa, synthetic construct
  REGION 1..22: note = ATaRI peptide
TKILEDVVVRLRLCVLAEVYCS

SEQ ID NO: 3889 - protein, 34 aa, synthetic construct
  REGION 1..34: note = ATaRI peptide
ITYKAENLGKFFSHTAVNLSPGGTQHDFYNDNNS

SEQ ID NO: 3890 - protein, 36 aa, synthetic construct
  REGION 1..36: note = ATaRI peptide
IPQSIRLEGEWGGVAGGAGLDGPGLLHAGSSHSSPS

SEQ ID NO: 3891 - protein, 14 aa, synthetic construct
  REGION 1..14: note = ATaRI peptide
VVVVFFLSGERSVG

SEQ ID NO: 3892 - protein, 101 aa, synthetic construct
  REGION 1..101: note = ATaRI peptide
FCMILIVICECAQRGRAWGHGFLFQVPQGEKGGLPSLEKGNQAPGTKWACQYLWARQAVYLSNSPSPSPGLVIHLTAIYRAHHVSSINEATHHCCELGLLL

SEQ ID NO: 3893 - protein, 9 aa, synthetic construct
  REGION 1..9: note = ATaRI peptide
FQPDGYEQT

SEQ ID NO: 3894 - protein, 9 aa, synthetic construct
  REGION 1..9: note = ATaRI peptide
KLHPITRLE

SEQ ID NO: 3895 - protein, 23 aa, synthetic construct
  REGION 1..23: note = ATaRI peptide
IRPEARYRVRRSFLGFSPVSFGV

SEQ ID NO: 3896 - protein, 9 aa, synthetic construct
  REGION 1..9: note = ATaRI peptide
TANKKSKAR

SEQ ID NO: 3897 - protein, 12 aa, synthetic construct
  REGION 1..12: note = ATaRI peptide
PVSFTPTACETS

SEQ ID NO: 3898 - protein, 12 aa, synthetic construct
  REGION 1..12: note = ATaRI peptide
DEWKHLDHVRIL

SEQ ID NO: 3899 - protein, 22 aa, synthetic construct
  REGION 1..22: note = ATaRI peptide
NEQEESTEVRALRPGGWGEQLE

SEQ ID NO: 3900 - protein, 164 aa, synthetic construct
  REGION 1..164: note = ATaRI peptide
RRSLRPWRVSGGGAGGGGCSALRPLPPRPRSARPRARSGRGAEGAGAGTAAGREGRGREQRGSRGPAGELRGRNSRGEPGRRGGGSGPEQRQPGRPWAGAGGAPCRELRGRRRRGGLEQPRPGRRLGGARGPGRGCGRSCGQEGLGGLTTKNFCGADCMPRART

SEQ ID NO: 3901 - protein, 44 aa, synthetic construct
  REGION 1..44: note = ATaRI peptide
MQPYPPLEVSRGGRVEEDTGHGHHGQPGPILSTSCVPDTVLGIP

SEQ ID NO: 3902 - protein, 34 aa, synthetic construct
  REGION 1..34: note = ATaRI peptide
MTQHKNEQVGGWWQQGPTPHQSKPFTGARVLNAA

SEQ ID NO: 3903 - protein, 9 aa, synthetic construct
  REGION 1..9: note = ATaRI peptide
PKKDNAVYK

SEQ ID NO: 3904 - protein, 16 aa, synthetic construct
  REGION 1..16: note = ATaRI peptide
GFGEEFDEVSSFVQIP

SEQ ID NO: 3905 - protein, 12 aa, synthetic construct
  REGION 1..12: note = ATaRI peptide
SIALPSKPGECF

SEQ ID NO: 3906 - protein, 17 aa, synthetic construct
  REGION 1..17: note = ATaRI peptide
RVLAGQTLGKPLFTIFS

SEQ ID NO: 3907 - protein, 42 aa, synthetic construct
  REGION 1..42: note = ATaRI peptide
TLKSNNMKRMYVRLIEIALSCLFFWKKFICQTCIMTHVLSYF

SEQ ID NO: 3908 - protein, 29 aa, synthetic construct
  REGION 1..29: note = ATaRI peptide
QYFRFWCQVSIGTVSLYCLNFVVLLYITQ

SEQ ID NO: 3909 - protein, 24 aa, synthetic construct
  REGION 1..24: note = ATaRI peptide
ELSSFPPKVPLHFACKYYFLNLIF

SEQ ID NO: 3910 - protein, 50 aa, synthetic construct
  REGION 1..50: note = ATaRI peptide
FIGRFIAMVSAGQELCLLCLFSNTKFSLRCHNRSYERKGSGFLFCFVFYF

SEQ ID NO: 3911 - protein, 11 aa, synthetic construct
  REGION 1..11: note = ATaRI peptide
KQIMWFWQVCF

SEQ ID NO: 3912 - protein, 54 aa, synthetic construct
  REGION 1..54: note = ATaRI peptide
KSKRVQPQVSISALPWAPLLCLLVCVLICPLPVCPIEVAARPNLLPLAPGQLDI

SEQ ID NO: 3913 - protein, 11 aa, synthetic construct
  REGION 1..11: note = ATaRI peptide
PGYYVTGDGEP

SEQ ID NO: 3914 - protein, 9 aa, synthetic construct
  REGION 1..9: note = ATaRI peptide
KCTWLIEGQ

SEQ ID NO: 3915 - protein, 9 aa, synthetic construct
  REGION 1..9: note = ATaRI peptide
YAPLVAAFR

SEQ ID NO: 3916 - protein, 57 aa, synthetic construct
  REGION 1..57: note = ATaRI peptide
EKRLEATGVSEAELSAPPGSSVNILVRFHLLTEGGWSVQVRCLVEGSLSQPLRGLSH

SEQ ID NO: 3917 - protein, 46 aa, synthetic construct
  REGION 1..46: note = ATaRI peptide
KVQKLKEQVWRVVSGVGEKGALIYPFDHEGFLGTSYVPGPVLGADI

SEQ ID NO: 3918 - protein, 23 aa, synthetic construct
  REGION 1..23: note = ATaRI peptide
RQLSQNQEGEKLKTGREIEREKG

SEQ ID NO: 3919 - protein, 63 aa, synthetic construct
  REGION 1..63: note = ATaRI peptide
TASSPTQQVYSFSSAAALESPTPATRNSALLIAYPGPTALQLVQRAPPDCILPCSAQLSLSLP

SEQ ID NO: 3920 - protein, 68 aa, synthetic construct
  REGION 1..68: note = ATaRI peptide
CVAELQKEVCSGFSKPIFPPLHSGPLCTSSRERGSSSLQRTSVSMGGKNSPSPNPISHMPRVGVGKKA

SEQ ID NO: 3921 - protein, 12 aa, synthetic construct
  REGION 1..12: note = ATaRI peptide
SLLSLFLSGEGQ

SEQ ID NO: 3922 - protein, 27 aa, synthetic construct
  REGION 1..27: note = ATaRI peptide
APRDFAVFVSADEVRRWGILPREPKQS

SEQ ID NO: 3923 - protein, 9 aa, synthetic construct
  REGION 1..9: note = ATaRI peptide
GHSAVLHNR

SEQ ID NO: 3924 - protein, 32 aa, synthetic construct
  REGION 1..32: note = ATaRI peptide
KSECFSKRSMFFFLYLDFNEFETSFYLNCEGT

SEQ ID NO: 3925 - protein, 10 aa, synthetic construct
  REGION 1..10: note = ATaRI peptide
IMQSSQSMVS

SEQ ID NO: 3926 - protein, 22 aa, synthetic construct
  REGION 1..22: note = ATaRI peptide
NGSVCERPGKFTGELGGIQSLL

SEQ ID NO: 3927 - protein, 10 aa, synthetic construct
  REGION 1..10: note = ATaRI peptide
WYTMSTCPRK

SEQ ID NO: 3928 - protein, 20 aa, synthetic construct
  REGION 1..20: note = ATaRI peptide
RPRLDKNSCESTVCLCVARI

SEQ ID NO: 3929 - protein, 30 aa, synthetic construct
  REGION 1..30: note = ATaRI peptide
DPKPGSPKVCGCLVLVLHSLRECLQVILLV

SEQ ID NO: 3930 - protein, 66 aa, synthetic construct
  REGION 1..66: note = ATaRI peptide
DSIEKELDGRAPSLAPCALACSRAPPDELLSEPPSLSLQGPLYSLLLFFSASPHLHSPLRMDEPYF

SEQ ID NO: 3931 - protein, 46 aa, synthetic construct
  REGION 1..46: note = ATaRI peptide
NFVATPDEVRFFKVFLFCFEFVWIFFLVITDGRTALTVLSRLEYTR

SEQ ID NO: 3932 - protein, 24 aa, synthetic construct
  REGION 1..24: note = ATaRI peptide
ITWAASFSGKDIPREDPANEGVVD

SEQ ID NO: 3933 - protein, 12 aa, synthetic construct
  REGION 1..12: note = ATaRI peptide
SEYECEVEVGEH

SEQ ID NO: 3934 - protein, 9 aa, synthetic construct
  REGION 1..9: note = ATaRI peptide
IMELHKTYR

SEQ ID NO: 3935 - protein, 95 aa, synthetic construct
  REGION 1..95: note = ATaRI peptide
PTKIKELKVGAWLSHTLCPGDQEADLRSSLGLDLHMPPAVAKHPYYGVHHGRALPLGHLSIPGPCRDGVGMGVGMLPVLYSPQLCPAFPEGHSVP

SEQ ID NO: 3936 - protein, 23 aa, synthetic construct
  REGION 1..23: note = ATaRI peptide
TTPRHKQEVLHGTCPSLPSRSHP

SEQ ID NO: 3937 - protein, 89 aa, synthetic construct
  REGION 1..89: note = ATaRI peptide
VSAMDNTQVTCAFQCTLSMGIGHLVVGSPLLWPNPLASSFNLSFPGTHMLILMLSCASVSSLSSGEGQRVKQVPVLGRPYFLKPPFSHP

SEQ ID NO: 3938 - protein, 10 aa, synthetic construct
  REGION 1..10: note = ATaRI peptide
TETISTTMVS

SEQ ID NO: 3939 - protein, 81 aa, synthetic construct
  REGION 1..81: note = ATaRI peptide
NDITYILTGTSFVVVVVVVVVVVVVVETESCSVAQAGVQWCEFGSLQAPPPGFTPFSCLSLLSSWDYRRPPPRPANFVLYF

SEQ ID NO: 3940 - protein, 22 aa, synthetic construct
  REGION 1..22: note = ATaRI peptide
VRESETTKGTSALAGQRILSLL

SEQ ID NO: 3941 - protein, 42 aa, synthetic construct
  REGION 1..42: note = ATaRI peptide
GCFGEVWMGKAWPLPSGEASTPHPVWQLRAPLVPLPLAASAG

SEQ ID NO: 3942 - protein, 60 aa, synthetic construct
  REGION 1..60: note = ATaRI peptide
ADGVHNTLGERKGACHCLSCFVFVLGLCAHFPSFFIIESIAGCFPSFCSQTAFSEMKTFV

SEQ ID NO: 3943 - protein, 9 aa, synthetic construct
  REGION 1..9: note = ATaRI peptide
MHDLAGLGR

SEQ ID NO: 3944 - protein, 9 aa, synthetic construct
  REGION 1..9: note = ATaRI peptide
FSSERGPRM

SEQ ID NO: 3945 - protein, 22 aa, synthetic construct
  REGION 1..22: note = ATaRI peptide
DPSAGPLLVGLDPQRVGNSGLK

SEQ ID NO: 3946 - protein, 18 aa, synthetic construct
  REGION 1..18: note = ATaRI peptide
NLLKTDKEVSVSKFHSLI

SEQ ID NO: 3947 - protein, 19 aa, synthetic construct
  REGION 1..19: note = ATaRI peptide
LLAPPTVQGLFIFFFLIYF

SEQ ID NO: 3948 - protein, 53 aa, synthetic construct
  REGION 1..53: note = ATaRI peptide
INRDSSMTGKYYSRNMLSLFSFSFFFFFLVFPTCKINMYLKKLSVSDQAMSCA

SEQ ID NO: 3949 - protein, 9 aa, synthetic construct
  REGION 1..9: note = ATaRI peptide
ALETILPDR

SEQ ID NO: 3950 - protein, 23 aa, synthetic construct
  REGION 1..23: note = ATaRI peptide
RGAKANQKVFIRSYREVCVCFVI

SEQ ID NO: 3951 - protein, 16 aa, synthetic construct
  REGION 1..16: note = ATaRI peptide
FLSLEALKVIFMNFYE

SEQ ID NO: 3952 - protein, 33 aa, synthetic construct
  REGION 1..33: note = ATaRI peptide
DDGEGSQQGKTHSVSNVSCFLFVSLVFFFPPLL

SEQ ID NO: 3953 - protein, 38 aa, synthetic construct
  REGION 1..38: note = ATaRI peptide
VPSPVESLSKMIFAWSCFRIYFYIPGLCDITALEEILK

SEQ ID NO: 3954 - protein, 11 aa, synthetic construct
  REGION 1..11: note = ATaRI peptide
WVERYDDIGTV

SEQ ID NO: 3955 - protein, 49 aa, synthetic construct
  REGION 1..49: note = ATaRI peptide
SVYQSYQPRERPALALLDPQPAPWPPLSFSLSLYFLPFSVILFLVTVKR

SEQ ID NO: 3956 - protein, 43 aa, synthetic construct
  REGION 1..43: note = ATaRI peptide
ELGSTHTAGMHGIWNYRVLLISQVRVRIRVAPSGFLEQETRWE

SEQ ID NO: 3957 - protein, 36 aa, synthetic construct
  REGION 1..36: note = ATaRI peptide
PAPGCLLTGEGRSRLGWAGFEGRGAVSSPLTLLSER

SEQ ID NO: 3958 - protein, 9 aa, synthetic construct
  REGION 1..9: note = ATaRI peptide
HVLPILEGR

SEQ ID NO: 3959 - protein, 32 aa, synthetic construct
  REGION 1..32: note = ATaRI peptide
YIAEDYVEGIQEDVCLQLLGVVYLVFLKLLPA

SEQ ID NO: 3960 - protein, 9 aa, synthetic construct
  REGION 1..9: note = ATaRI peptide
EKPVTTVQV

SEQ ID NO: 3961 - protein, 48 aa, synthetic construct
  REGION 1..48: note = ATaRI peptide
RPFRSSFQVLIVRVVNYFENSITCFLIAKVIIMQKYPLLTFLWLFFWS

SEQ ID NO: 3962 - protein, 46 aa, synthetic construct
  REGION 1..46: note = ATaRI peptide
TGTEYTCKVRAHGRLSPSTTGGLGRRPPKDCQGAEGSLCSFILVFV

SEQ ID NO: 3963 - protein, 19 aa, synthetic construct
  REGION 1..19: note = ATaRI peptide
RQKLPVFKVRQIIMFNLWA

SEQ ID NO: 3964 - protein, 16 aa, synthetic construct
  REGION 1..16: note = ATaRI peptide
DQLATRIKVKCSSCFS

SEQ ID NO: 3965 - protein, 9 aa, synthetic construct
  REGION 1..9: note = ATaRI peptide
IAIGLLKKV

SEQ ID NO: 3966 - protein, 12 aa, synthetic construct
  REGION 1..12: note = ATaRI peptide
RVSRSVRKVRLS

SEQ ID NO: 3967 - protein, 9 aa, synthetic construct
  REGION 1..9: note = ATaRI peptide
GKCYRLYTG

SEQ ID NO: 3968 - protein, 10 aa, synthetic construct
  REGION 1..10: note = ATaRI peptide
FAKMLLESGG

SEQ ID NO: 3969 - protein, 43 aa, synthetic construct
  REGION 1..43: note = ATaRI peptide
PPNQKSHAVSQLCPQAVCTSLFCFELSLSKLYSGTAEDRAVQM

SEQ ID NO: 3970 - protein, 27 aa, synthetic construct
  REGION 1..27: note = ATaRI peptide
NIYEAFIKVSTTTARSAASTHHPLEVI

SEQ ID NO: 3971 - protein, 24 aa, synthetic construct
  REGION 1..24: note = ATaRI peptide
QVPRKSSEGEKKPSQLVTSLASFC

SEQ ID NO: 3972 - protein, 9 aa, synthetic construct
  REGION 1..9: note = ATaRI peptide
EVSPTQDIR

SEQ ID NO: 3973 - protein, 9 aa, synthetic construct
  REGION 1..9: note = ATaRI peptide
LKRPRDEDE

SEQ ID NO: 3974 - protein, 38 aa, synthetic construct
  REGION 1..38: note = ATaRI peptide
LMYSAQKTVHEPPALPQPLPLLFHPTPQLCLPQPCCPA

SEQ ID NO: 3975 - protein, 9 aa, synthetic construct
  REGION 1..9: note = ATaRI peptide
KEHAFVASE

SEQ ID NO: 3976 - protein, 71 aa, synthetic construct
  REGION 1..71: note = ATaRI peptide
ANPMPTFKVQLRPLGIGSWGGSPAAWGFISVFWAICGLCGEVVVVVFRGPRGCERCVVGERPQVSQGRPTP

SEQ ID NO: 3977 - protein, 13 aa, synthetic construct
  REGION 1..13: note = ATaRI peptide
VQELESDDVSLPS

SEQ ID NO: 3978 - protein, 9 aa, synthetic construct
  REGION 1..9: note = ATaRI peptide
DGEWPPQAR

SEQ ID NO: 3979 - protein, 26 aa, synthetic construct
  REGION 1..26: note = ATaRI peptide
LRLSSDQIVSVGCLCGGWGGAELILS

SEQ ID NO: 3980 - protein, 9 aa, synthetic construct
  REGION 1..9: note = ATaRI peptide
TSLYHKIQL

SEQ ID NO: 3981 - protein, 13 aa, synthetic construct
  REGION 1..13: note = ATaRI peptide
ERQLRMLEGEALP

SEQ ID NO: 3982 - protein, 49 aa, synthetic construct
  REGION 1..49: note = ATaRI peptide
YTESSKTAVSGAFGVRRGVVGVFCMCVRSRVRRARVVFTKGCSGEAGME

SEQ ID NO: 3983 - protein, 39 aa, synthetic construct
  REGION 1..39: note = ATaRI peptide
LGSKADFVGDLPVEHWPPWGSQLPAEAAQKHINTHPAAF

SEQ ID NO: 3984 - protein, 50 aa, synthetic construct
  REGION 1..50: note = ATaRI peptide
HLPFVRSSVSLFSIIFFYSHTTNKGQDAHSDLGTLSAGLGLPCLVALLRS

SEQ ID NO: 3985 - protein, 47 aa, synthetic construct
  REGION 1..47: note = ATaRI peptide
PLPTLQPAVSRCAWEIPLQSPTVALILSAGIRCGPFHVPFVALLVES

SEQ ID NO: 3986 - protein, 44 aa, synthetic construct
  REGION 1..44: note = ATaRI peptide
CHVVCIRPGISLDCCGVCVSSPSAVCPFSTLSSFPSPFFTPPLL

SEQ ID NO: 3987 - protein, 50 aa, synthetic construct
  REGION 1..50: note = ATaRI peptide
QLLRDNLTVSTTSTGFIVSFLFTYLIIHCYLQEGICTIKCSYSFKLLNLL

SEQ ID NO: 3988 - protein, 80 aa, synthetic construct
  REGION 1..80: note = ATaRI peptide
INFQQPADGEPRGWGGRGRTDGQAGGQTEAGTGPLALSSYTLQPGKLRLKDNRALAEAWPLRRELVISVVYCYSSTEERD

SEQ ID NO: 3989 - protein, 29 aa, synthetic construct
  REGION 1..29: note = ATaRI peptide
FGNILSCKVEDEGCTSLGRSVSTTCLVEG

SEQ ID NO: 3990 - protein, 20 aa, synthetic construct
  REGION 1..20: note = ATaRI peptide
QDRLRRYQVRSGFLVAATSV

SEQ ID NO: 3991 - protein, 9 aa, synthetic construct
  REGION 1..9: note = ATaRI peptide
ISIMQQCDR

SEQ ID NO: 3992 - protein, 17 aa, synthetic construct
  REGION 1..17: note = ATaRI peptide
IIRLRNKTVGLPSRTCN

SEQ ID NO: 3993 - protein, 19 aa, synthetic construct
  REGION 1..19: note = ATaRI peptide
YADIHPMRVRKWTESQWGG

SEQ ID NO: 3994 - protein, 9 aa, synthetic construct
  REGION 1..9: note = ATaRI peptide
ATATQLLQV

SEQ ID NO: 3995 - protein, 25 aa, synthetic construct
  REGION 1..25: note = ATaRI peptide
DQDDEENSVSGSRCCGPQTLMLVIL

SEQ ID NO: 3996 - protein, 70 aa, synthetic construct
  REGION 1..70: note = ATaRI peptide
ATFCSLPNGNPTAAERERGGAALGWEEVGGPGFREQGRPRTRGPPGKSRRLKPDPSVLSLARPRGRQRRR

SEQ ID NO: 3997 - protein, 77 aa, synthetic construct
  REGION 1..77: note = ATaRI peptide
ACRSCLEQVRPKGTRDAGTRFSSRASDKKCDLKPDVVAHTCNPSTVGGQGGQITQGQEFETSLGNVAKPHLYKQYEN

SEQ ID NO: 3998 - protein, 9 aa, synthetic construct
  REGION 1..9: note = ATaRI peptide
PIRREGPKV

SEQ ID NO: 3999 - protein, 18 aa, synthetic construct
  REGION 1..18: note = ATaRI peptide
MRATGGKMVSIIHLCHCQ

SEQ ID NO: 4000 - protein, 23 aa, synthetic construct
  REGION 1..23: note = ATaRI peptide
RELCQQREGTCLWAAASFISTHL

SEQ ID NO: 4001 - protein, 93 aa, synthetic construct
  REGION 1..93: note = ATaRI peptide
SASKEDYMVSGSPGEKASFRALWPLPPGSLLCLSRLGKASPSGLFLCSMADVRHSSVPKLMTVEMFLWAPGFLPQNISINNLNGVLCLATHHR

SEQ ID NO: 4002 - protein, 31 aa, synthetic construct
  REGION 1..31: note = ATaRI peptide
ILKENNISGRGKVKEEPAVMPSALYPDGRDK

SEQ ID NO: 4003 - protein, 41 aa, synthetic construct
  REGION 1..41: note = ATaRI peptide
QIRQIKEQGNKNTHVFLNSGGSQPFWHQGLVLWKPVFPWTW

SEQ ID NO: 4004 - protein, 17 aa, synthetic construct
  REGION 1..17: note = ATaRI peptide
SLGPLLLQASIKILTVQ

SEQ ID NO: 4005 - protein, 9 aa, synthetic construct
  REGION 1..9: note = ATaRI peptide
FVSTHFLQR

SEQ ID NO: 4006 - protein, 26 aa, synthetic construct
  REGION 1..26: note = ATaRI peptide
IKTETSEEVICFLYISAHISSFFGVR

SEQ ID NO: 4007 - protein, 21 aa, synthetic construct
  REGION 1..21: note = ATaRI peptide
VFQGTNSLGKNELGFFFFCCL

SEQ ID NO: 4008 - protein, 18 aa, synthetic construct
  REGION 1..18: note = ATaRI peptide
GVQLQIIKVCLFVCLSGF

SEQ ID NO: 4009 - protein, 64 aa, synthetic construct
  REGION 1..64: note = ATaRI peptide
DVVTSAIKGKNQGQPSLSSSLIPPKSPQQNILVVEFPLPCPKNWWSSWKLNLPTSAHLLYGIQK

SEQ ID NO: 4010 - protein, 9 aa, synthetic construct
  REGION 1..9: note = ATaRI peptide
LGEGPPDPK

SEQ ID NO: 4011 - protein, 23 aa, synthetic construct
  REGION 1..23: note = ATaRI peptide
MHLKMQIEVRIPKFFHFIIYYYY

SEQ ID NO: 4012 - protein, 23 aa, synthetic construct
  REGION 1..23: note = ATaRI peptide
QTLTRICAGISTWGHSSTGLLML

SEQ ID NO: 4013 - protein, 24 aa, synthetic construct
  REGION 1..24: note = ATaRI peptide
ELGMTPLQVKTLWTLNYIKVYSFQ

SEQ ID NO: 4014 - protein, 27 aa, synthetic construct
  REGION 1..27: note = ATaRI peptide
NPNHQTSLGETALLPHPPPFIIGSYDC

SEQ ID NO: 4015 - protein, 30 aa, synthetic construct
  REGION 1..30: note = ATaRI peptide
HQEERLDSVRLGGVALACEFCQVIVSPYQF

SEQ ID NO: 4016 - protein, 11 aa, synthetic construct
  REGION 1..11: note = ATaRI peptide
IATKSTKQSKV

SEQ ID NO: 4017 - protein, 30 aa, synthetic construct
  REGION 1..30: note = ATaRI peptide
IACIFGMQVGVSQQHSRDTGGLCSFRFGKT

SEQ ID NO: 4018 - protein, 23 aa, synthetic construct
  REGION 1..23: note = ATaRI peptide
EEFMGLGLGKTPGPTANSHGFAS

SEQ ID NO: 4019 - protein, 54 aa, synthetic construct
  REGION 1..54: note = ATaRI peptide
FQTTCHIVSKWLCSLPTNVPPASLEECHLLSILLPTGASLPWLYCDIVMCQAVL

SEQ ID NO: 4020 - protein, 28 aa, synthetic construct
  REGION 1..28: note = ATaRI peptide
EDSSEKHLVGFGVFLWLSFLFSILVKDQ

SEQ ID NO: 4021 - protein, 27 aa, synthetic construct
  REGION 1..27: note = ATaRI peptide
AEHMVAAQVRTGGLRKSIPVHREVALM

SEQ ID NO: 4022 - protein, 16 aa, synthetic construct
  REGION 1..16: note = ATaRI peptide
QRTVLWRAGKATQQIR

SEQ ID NO: 4023 - protein, 38 aa, synthetic construct
  REGION 1..38: note = ATaRI peptide
LILPSDVQVKKINVFWLINSFRTGERNLCIICLLINIF

SEQ ID NO: 4024 - protein, 14 aa, synthetic construct
  REGION 1..14: note = ATaRI peptide
LPLTNLFKVWNASW

SEQ ID NO: 4025 - protein, 21 aa, synthetic construct
  REGION 1..21: note = ATaRI peptide
LFYSLNFQVSSFDFLLLVLTL

SEQ ID NO: 4026 - protein, 17 aa, synthetic construct
  REGION 1..17: note = ATaRI peptide
IVPNMEFRGNYGKSILV

SEQ ID NO: 4027 - protein, 31 aa, synthetic construct
  REGION 1..31: note = ATaRI peptide
ASKAQTQKVNIFNVVLFLKQTSVTPTQVKKK

SEQ ID NO: 4028 - protein, 11 aa, synthetic construct
  REGION 1..11: note = ATaRI peptide
LPDLKSANGEL

SEQ ID NO: 4029 - protein, 9 aa, synthetic construct
  REGION 1..9: note = ATaRI peptide
MRGPNNATL

SEQ ID NO: 4030 - protein, 39 aa, synthetic construct
  REGION 1..39: note = ATaRI peptide
SENEYIMKGRLFPWCADYRYPISDCKGEHSELYFRLYSL

SEQ ID NO: 4031 - protein, 10 aa, synthetic construct
  REGION 1..10: note = ATaRI peptide
SKTTKFIKSK

SEQ ID NO: 4032 - protein, 9 aa, synthetic construct
  REGION 1..9: note = ATaRI peptide
MDTEYTKLW

SEQ ID NO: 4033 - protein, 42 aa, synthetic construct
  REGION 1..42: note = ATaRI peptide
DENILTKAGRRYGGGVSNGDRRSEGILLYFVGFPPLFCTVYL

SEQ ID NO: 4034 - protein, 29 aa, synthetic construct
  REGION 1..29: note = ATaRI peptide
CACAATGTGEKDRDPGWAEGCYGQGWALG

SEQ ID NO: 4035 - protein, 76 aa, synthetic construct
  REGION 1..76: note = ATaRI peptide
VLILDEADRCSSQPGAQGTVGFQGPEPGCGPATLRYSLWLWAMAVGVRYQISHLCWGLCPALAHVFLFFLFLYYGG

SEQ ID NO: 4036 - protein, 9 aa, synthetic construct
  REGION 1..9: note = ATaRI peptide
MGEKMAEEE

SEQ ID NO: 4037 - protein, 11 aa, synthetic construct
  REGION 1..11: note = ATaRI peptide
LTGLISALISF

SEQ ID NO: 4038 - protein, 25 aa, synthetic construct
  REGION 1..25: note = ATaRI peptide
ISFVIWCIVSIFLFFFKFNYLFVDQ

SEQ ID NO: 4039 - protein, 37 aa, synthetic construct
  REGION 1..37: note = ATaRI peptide
EFCSLADLVSGCLEGVGLGPGQTSGPCWSFLRKPFWW

SEQ ID NO: 4040 - protein, 69 aa, synthetic construct
  REGION 1..69: note = ATaRI peptide
AGLPSFRNVSILPREVRGGPLPLRSADPSVGRSMQEAEFRGAHFTSADRKRVQAARHLSLSLSPVSPGL

SEQ ID NO: 4041 - protein, 9 aa, synthetic construct
  REGION 1..9: note = ATaRI peptide
RALSNLSSR

SEQ ID NO: 4042 - protein, 9 aa, synthetic construct
  REGION 1..9: note = ATaRI peptide
LPWFRTLSW

SEQ ID NO: 4043 - protein, 13 aa, synthetic construct
  REGION 1..13: note = ATaRI peptide
FGRTPLIKVNGLP

SEQ ID NO: 4044 - protein, 10 aa, synthetic construct
  REGION 1..10: note = ATaRI peptide
QEMLEEAKVC

SEQ ID NO: 4045 - protein, 20 aa, synthetic construct
  REGION 1..20: note = ATaRI peptide
KRAFKYIQVGIFRKELYIFS

SEQ ID NO: 4046 - protein, 10 aa, synthetic construct
  REGION 1..10: note = ATaRI peptide
GRTLVRYTGM

SEQ ID NO: 4047 - protein, 9 aa, synthetic construct
  REGION 1..9: note = ATaRI peptide
QASWTVRPR

SEQ ID NO: 4048 - protein, 31 aa, synthetic construct
  REGION 1..31: note = ATaRI peptide
KTLSFPKQVRILPPTRHGLRGMETPRGLTTS

SEQ ID NO: 4049 - protein, 77 aa, synthetic construct
  REGION 1..77: note = ATaRI peptide
HRGPVVLKVSLVQGPLITQTSAPRVWGSWDHAHIAFQHYHGGQGLSLQNTHHHSEANFITSFLPMEPSPALENIMTT

SEQ ID NO: 4050 - protein, 23 aa, synthetic construct
  REGION 1..23: note = ATaRI peptide
ASHIKSIKVTRVILKCCEGLNSG

SEQ ID NO: 4051 - protein, 92 aa, synthetic construct
  REGION 1..92: note = ATaRI peptide
GLEMNGRHRLVTDLGQMMWEAGGILPVLVAVVPELSSHVACFLVSLGLVAPWRKWCLVMSTFISVSHCYGTSSEIQPGLRPSVLEVGKQNLK

SEQ ID NO: 4052 - protein, 41 aa, synthetic construct
  REGION 1..41: note = ATaRI peptide
YRQSQSHEGTTKSFLGLVGRVWAEFLPSRTEPEMTWEPPLG

SEQ ID NO: 4053 - protein, 49 aa, synthetic construct
  REGION 1..49: note = ATaRI peptide
NQAIQIAQVTEASAERLGTTGTQDCDGSLSEIIIIIIIRKRAVRLCQIN

SEQ ID NO: 4054 - protein, 24 aa, synthetic construct
  REGION 1..24: note = ATaRI peptide
ERCYCADVVRDFNLICIYFKKKTK

SEQ ID NO: 4055 - protein, 9 aa, synthetic construct
  REGION 1..9: note = ATaRI peptide
NKCDLIDVR

SEQ ID NO: 4056 - protein, 23 aa, synthetic construct
  REGION 1..23: note = ATaRI peptide
INELFIEISEYLCALSISSVKAA

SEQ ID NO: 4057 - protein, 24 aa, synthetic construct
  REGION 1..24: note = ATaRI peptide
REENKQFKVIVYFLVIYRKQGRFH

SEQ ID NO: 4058 - protein, 9 aa, synthetic construct
  REGION 1..9: note = ATaRI peptide
NISSELKTR

SEQ ID NO: 4059 - protein, 62 aa, synthetic construct
  REGION 1..62: note = ATaRI peptide
VPGVPQHGGQICPESPPARRPDMSRESPSTEARYVPRVPQHGGQICPESPWHSCEALLPELG

SEQ ID NO: 4060 - protein, 115 aa, synthetic construct
  REGION 1..115: note = ATaRI peptide
MGQQYYPDGEHWRRPDPAQERRAAAGARRARRARRVWPLQCVLSHSSSGLGYRQSGQTPCRSKVGDGVSWAGSGAWPLQREAVAHTAALASTRPCLYFLKGCGSWRRIIVAPSCR

SEQ ID NO: 4061 - protein, 38 aa, synthetic construct
  REGION 1..38: note = ATaRI peptide
PQPLERMQVGLRGARQEFVMKVMPLACLATQSWGPRHL

SEQ ID NO: 4062 - protein, 149 aa, synthetic construct
  REGION 1..149: note = ATaRI peptide
TRPPNSAQVCVPPWPDVSACSCHTHLWAQPHGSSLSLGPCLPPRLSLLSQSRQGPPPLSEWLLLSLELRPGPVLVCLGACCWGWAPLLHRTCRSRCGRMLSCVSELPAGHTCLCFPWEHQTDVAIAGQVRLIKRGFQACLGRLLSHLSI

SEQ ID NO: 4063 - protein, 9 aa, synthetic construct
  REGION 1..9: note = ATaRI peptide
NIYTEMGRR

SEQ ID NO: 4064 - protein, 28 aa, synthetic construct
  REGION 1..28: note = ATaRI peptide
TMYDMQALVSPTALPVPPDGGTNPHTAL

SEQ ID NO: 4065 - protein, 102 aa, synthetic construct
  REGION 1..102: note = ATaRI peptide
EIIQEVREGEARERLGLGFRKGQTLAKGREVRVRTPGLQGGVRVQRRPRPTCAWVVLEPPGLERTLFESSGWTEAEACVGSKRRSSPWPDHPPASATTVGFR

SEQ ID NO: 4066 - protein, 99 aa, synthetic construct
  REGION 1..99: note = ATaRI peptide
NEIRFLPNGRCLTTTGSRRFHPCLAGVVHWALVWDVPGDYQGHGFQIAPQCPLEAARGTPGSPAWDLRSGVWVGVGYLCKEPETEYLQLFRPHSLYQNY

SEQ ID NO: 4067 - protein, 107 aa, synthetic construct
  REGION 1..107: note = ATaRI peptide
PLTLREVEVSQALAVTGGEDGEAWASHAAAETGSPLAVGIWCPLRGPLEGRRAERASSMMTFPPQWSSPHQASRETQFPRLFVPMRESGAEPLRDPEWRDLPFSPLV

SEQ ID NO: 4068 - protein, 13 aa, synthetic construct
  REGION 1..13: note = ATaRI peptide
LIMNYLVTGNGLQ

SEQ ID NO: 4069 - protein, 9 aa, synthetic construct
  REGION 1..9: note = ATaRI peptide
RTLPSMVHR

SEQ ID NO: 4070 - protein, 17 aa, synthetic construct
  REGION 1..17: note = ATaRI peptide
ATSASQVQVILLPQPPE

SEQ ID NO: 4071 - protein, 21 aa, synthetic construct
  REGION 1..21: note = ATaRI peptide
EDRVGTIKVIVPGLFDGLGKV

SEQ ID NO: 4072 - protein, 47 aa, synthetic construct
  REGION 1..47: note = ATaRI peptide
QMTLKSPIGKWTSVAPTSPQEDTHAPCGLVCILPRTIAHTLSWPTQR

SEQ ID NO: 4073 - protein, 104 aa, synthetic construct
  REGION 1..104: note = ATaRI peptide
VLSSWWAKVRASCLPCGHPSHSCRAGTRVSPAVRAPESLLPCGHPSLSCRAGTRVSPAVRAPESLLPCGRPSHSCRAGTRVSPAMWAPGSLHACRVPSIAEPMR

SEQ ID NO: 4074 - protein, 9 aa, synthetic construct
  REGION 1..9: note = ATaRI peptide
GYVPGLGRG

SEQ ID NO: 4075 - protein, 24 aa, synthetic construct
  REGION 1..24: note = ATaRI peptide
ECCPTSVEVSLAGSGPPEPKVAKA

SEQ ID NO: 4076 - protein, 130 aa, synthetic construct
  REGION 1..130: note = ATaRI peptide
SILALAFQVGEGCLCGEGPVHTGADLGADWGLKISHIQCGTCCCWGALESRGCSTGAGAVKGPESRKAAHLADTYLSVPPLSVTTGKCFRTWNTGSHRLRAPLCEWMYSDRLTEPGLRVPGCHEGGVCFF

SEQ ID NO: 4077 - protein, 15 aa, synthetic construct
  REGION 1..15: note = ATaRI peptide
SSMVGLILGKCGRRV

SEQ ID NO: 4078 - protein, 9 aa, synthetic construct
  REGION 1..9: note = ATaRI peptide
IRTSDSFDK

SEQ ID NO: 4079 - protein, 58 aa, synthetic construct
  REGION 1..58: note = ATaRI peptide
SWGQKLTQVGASEPARETLFSTFLLCLSLFPSSVPSPSPPSSFPFSFPPAVLSFNSNC

SEQ ID NO: 4080 - protein, 9 aa, synthetic construct
  REGION 1..9: note = ATaRI peptide
SRDAFLEKA

SEQ ID NO: 4081 - protein, 9 aa, synthetic construct
  REGION 1..9: note = ATaRI peptide
PEGRIPLKK

SEQ ID NO: 4082 - protein, 9 aa, synthetic construct
  REGION 1..9: note = ATaRI peptide
EIDNIFSEL

SEQ ID NO: 4083 - protein, 25 aa, synthetic construct
  REGION 1..25: note = ATaRI peptide
PNNSLARKGQYFLSHQREALVSDWG

SEQ ID NO: 4084 - protein, 47 aa, synthetic construct
  REGION 1..47: note = ATaRI peptide
SSHNTYLTGMNFLVLCYFSQSHQISPTSTFCCSEAEVCFLPFPAKCL

SEQ ID NO: 4085 - protein, 27 aa, synthetic construct
  REGION 1..27: note = ATaRI peptide
MTTEISFKVEYMNVTKRGSWRHLIPFG

SEQ ID NO: 4086 - protein, 44 aa, synthetic construct
  REGION 1..44: note = ATaRI peptide
FEPSSPGAGEGLVGSPRHVLCWFKNCCSGLCVVAHACNTTTFGG

SEQ ID NO: 4087 - protein, 21 aa, synthetic construct
  REGION 1..21: note = ATaRI peptide
FESFEISKSKFSLEKNPSCSI

SEQ ID NO: 4088 - protein, 28 aa, synthetic construct
  REGION 1..28: note = ATaRI peptide
VANTLSVKVGIPHHKIVPNNSVEFIYIA

SEQ ID NO: 4089 - protein, 71 aa, synthetic construct
  REGION 1..71: note = ATaRI peptide
DYVPDTYAGKQLNSNTTLLKGVFLSESPYIFGLVKGKLNQTKQEILASESPLLSYVCLEVNCLSHCEYILI

SEQ ID NO: 4090 - protein, 32 aa, synthetic construct
  REGION 1..32: note = ATaRI peptide
DEEEVKKEVRGCFNFTYSIKHDHHTYLLALPK

SEQ ID NO: 4091 - protein, 18 aa, synthetic construct
  REGION 1..18: note = ATaRI peptide
ALHSQPAPGKPSGKSWTT

SEQ ID NO: 4092 - protein, 18 aa, synthetic construct
  REGION 1..18: note = ATaRI peptide
DLIQSVLTGKCHPFPPWN

SEQ ID NO: 4093 - protein, 9 aa, synthetic construct
  REGION 1..9: note = ATaRI peptide
SAKKDSKKK

SEQ ID NO: 4094 - protein, 24 aa, synthetic construct
  REGION 1..24: note = ATaRI peptide
QKREHIKLVSLRNMIYVCATGTPL

SEQ ID NO: 4095 - protein, 15 aa, synthetic construct
  REGION 1..15: note = ATaRI peptide
QILDEKPKVNGTELK

SEQ ID NO: 4096 - protein, 32 aa, synthetic construct
  REGION 1..32: note = ATaRI peptide
LTWRSEGKVWPKKSKLFFLLCGLSHFVSQQVD

SEQ ID NO: 4097 - protein, 30 aa, synthetic construct
  REGION 1..30: note = ATaRI peptide
IRSGAIPKVPVIGICFSKHGFTYIGNGHGF

SEQ ID NO: 4098 - protein, 9 aa, synthetic construct
  REGION 1..9: note = ATaRI peptide
SPMTCLKKQ

SEQ ID NO: 4099 - protein, 17 aa, synthetic construct
  REGION 1..17: note = ATaRI peptide
ELGLPSGKVCINLIMYF

SEQ ID NO: 4100 - protein, 16 aa, synthetic construct
  REGION 1..16: note = ATaRI peptide
PDEDLKKKGNKHEKRT

SEQ ID NO: 4101 - protein, 9 aa, synthetic construct
  REGION 1..9: note = ATaRI peptide
RQVLLAGCR

SEQ ID NO: 4102 - protein, 35 aa, synthetic construct
  REGION 1..35: note = ATaRI peptide
MCTDILFKVTLKIITQTFPNSVKMQEIGRWRRENK

SEQ ID NO: 4103 - protein, 17 aa, synthetic construct
  REGION 1..17: note = ATaRI peptide
KQALESHPVCIFNKPYF

SEQ ID NO: 4104 - protein, 10 aa, synthetic construct
  REGION 1..10: note = ATaRI peptide
RLKPEVEKSK

SEQ ID NO: 4105 - protein, 20 aa, synthetic construct
  REGION 1..20: note = ATaRI peptide
DNEEEIESGELFAFILSYML

SEQ ID NO: 4106 - protein, 11 aa, synthetic construct
  REGION 1..11: note = ATaRI peptide
LEHENNKKVTK

SEQ ID NO: 4107 - protein, 13 aa, synthetic construct
  REGION 1..13: note = ATaRI peptide
FQGFHVAEGNTKG

SEQ ID NO: 4108 - protein, 11 aa, synthetic construct
  REGION 1..11: note = ATaRI peptide
VSLNYQTPGRS

SEQ ID NO: 4109 - protein, 94 aa, synthetic construct
  REGION 1..94: note = ATaRI peptide
EESFVFRKVGHFQHVKLTLITWEPCFSSQTLHDTGALIQPTTSSFSLLLMANFCSCHRIIGSIWPCLLLVLLSSLEEPISCTAVPQLWVYHLLE

SEQ ID NO: 4110 - protein, 13 aa, synthetic construct
  REGION 1..13: note = ATaRI peptide
MRAMGIETVSRNG

SEQ ID NO: 4111 - protein, 36 aa, synthetic construct
  REGION 1..36: note = ATaRI peptide
ASGVEAKKGEREPLGSLSSAPTLITQCTISIALGNI

SEQ ID NO: 4112 - protein, 25 aa, synthetic construct
  REGION 1..25: note = ATaRI peptide
SLKKKHAKVQCSTATILCYVWMNHL

SEQ ID NO: 4113 - protein, 9 aa, synthetic construct
  REGION 1..9: note = ATaRI peptide
LEKAMKKKG

SEQ ID NO: 4114 - protein, 17 aa, synthetic construct
  REGION 1..17: note = ATaRI peptide
LTSDHKSKVRKCPFLQQ

SEQ ID NO: 4115 - protein, 26 aa, synthetic construct
  REGION 1..26: note = ATaRI peptide
QQLKLSHDRWGNCRLQSKHLIFKNKS

SEQ ID NO: 4116 - protein, 9 aa, synthetic construct
  REGION 1..9: note = ATaRI peptide
IKNKAERER

SEQ ID NO: 4117 - protein, 43 aa, synthetic construct
  REGION 1..43: note = ATaRI peptide
FLEKQNEQVFYLKYVKTCRQLASFGIHMPWPTVTSGLHIVIER

SEQ ID NO: 4118 - protein, 24 aa, synthetic construct
  REGION 1..24: note = ATaRI peptide
QILQQALKVWPLFYDIQFVVYAHL

SEQ ID NO: 4119 - protein, 15 aa, synthetic construct
  REGION 1..15: note = ATaRI peptide
QDLPRNQKVKFKRFF

SEQ ID NO: 4120 - protein, 17 aa, synthetic construct
  REGION 1..17: note = ATaRI peptide
FPQVLYLDRYGLIYCMT

SEQ ID NO: 4121 - protein, 18 aa, synthetic construct
  REGION 1..18: note = ATaRI peptide
TVLQQRLERYFNFYEIRR

SEQ ID NO: 4122 - protein, 52 aa, synthetic construct
  REGION 1..52: note = ATaRI peptide
TEIENDTRGKKCLIAWLLSPQMDMCNVNIEKGNHVWILYLNIIVIFLFQKGF

SEQ ID NO: 4123 - protein, 12 aa, synthetic construct
  REGION 1..12: note = ATaRI peptide
DKAQFLIQGKNI

SEQ ID NO: 4124 - protein, 19 aa, synthetic construct
  REGION 1..19: note = ATaRI peptide
KEGGYDDEVPFTALCTIAT

SEQ ID NO: 4125 - protein, 9 aa, synthetic construct
  REGION 1..9: note = ATaRI peptide
DRNLSFDER

SEQ ID NO: 4126 - protein, 15 aa, synthetic construct
  REGION 1..15: note = ATaRI peptide
EVNLEEYEVMCFLRG

SEQ ID NO: 4127 - protein, 9 aa, synthetic construct
  REGION 1..9: note = ATaRI peptide
GLENFQRER

SEQ ID NO: 4128 - protein, 40 aa, synthetic construct
  REGION 1..40: note = ATaRI peptide
DNQKVDQVVSLICPCSLSSCLCNYLMCPSPCQSHGWAAGS

SEQ ID NO: 4129 - protein, 19 aa, synthetic construct
  REGION 1..19: note = ATaRI peptide
KKIHLVVLGKLFLFVLTGY

SEQ ID NO: 4130 - protein, 16 aa, synthetic construct
  REGION 1..16: note = ATaRI peptide
AAASPVYQVTMKTAQF

SEQ ID NO: 4131 - protein, 12 aa, synthetic construct
  REGION 1..12: note = ATaRI peptide
RKQSAQKKGWCF

SEQ ID NO: 4132 - protein, 17 aa, synthetic construct
  REGION 1..17: note = ATaRI peptide
SVQVISYQGKLLFMIVI

SEQ ID NO: 4133 - protein, 20 aa, synthetic construct
  REGION 1..20: note = ATaRI peptide
SHLELLRKCMKLQLFLYIVI

SEQ ID NO: 4134 - protein, 9 aa, synthetic construct
  REGION 1..9: note = ATaRI peptide
YEKLSRALR

SEQ ID NO: 4135 - protein, 19 aa, synthetic construct
  REGION 1..19: note = ATaRI peptide
LCLKCGHQVCLRFKINMGF

SEQ ID NO: 4136 - protein, 9 aa, synthetic construct
  REGION 1..9: note = ATaRI peptide
LSLDNWSVW

SEQ ID NO: 4137 - protein, 37 aa, synthetic construct
  REGION 1..37: note = ATaRI peptide
CFFNAVMQVHCHFFPFKKAVLFLIESATYIIEFFPPE

SEQ ID NO: 4138 - protein, 12 aa, synthetic construct
  REGION 1..12: note = ATaRI peptide
GMRAEEHQVSML

SEQ ID NO: 4139 - protein, 11 aa, synthetic construct
  REGION 1..11: note = ATaRI peptide
EELKNKVKGNV

SEQ ID NO: 4140 - protein, 42 aa, synthetic construct
  REGION 1..42: note = ATaRI peptide
IMCDQCRTVSRCHVYWVYLLIFNSLSIVYFKSRNLYLHRISF

SEQ ID NO: 4141 - protein, 15 aa, synthetic construct
  REGION 1..15: note = ATaRI peptide
NGPKANIKGILMLSL

SEQ ID NO: 4142 - protein, 17 aa, synthetic construct
  REGION 1..17: note = ATaRI peptide
LNITLPEEVRDPCFWQF

SEQ ID NO: 4143 - protein, 35 aa, synthetic construct
  REGION 1..35: note = ATaRI peptide
DSFTPFRKGKKKLLAELYSLVNITRAVHFPSHSFA

SEQ ID NO: 4144 - protein, 17 aa, synthetic construct
  REGION 1..17: note = ATaRI peptide
WENTSNAEVKRLYSIIL

SEQ ID NO: 4145 - protein, 31 aa, synthetic construct
  REGION 1..31: note = ATaRI peptide
AELSSRLSSKPLENTFFAAELGWKVQETRGA

SEQ ID NO: 4146 - protein, 48 aa, synthetic construct
  REGION 1..48: note = ATaRI peptide
LGTNHQLTVGAVFLTGHGEEATCGHSILMGRLSLKLQRDIQEREVHQA

SEQ ID NO: 4147 - protein, 16 aa, synthetic construct
  REGION 1..16: note = ATaRI peptide
RRLYAWLLGTEQYTPF

SEQ ID NO: 4148 - protein, 19 aa, synthetic construct
  REGION 1..19: note = ATaRI peptide
SLLDKPEIGNVRNAASILC

SEQ ID NO: 4149 - protein, 9 aa, synthetic construct
  REGION 1..9: note = ATaRI peptide
TRCFEECFR

SEQ ID NO: 4150 - protein, 23 aa, synthetic construct
  REGION 1..23: note = ATaRI peptide
CATLFQLPGERQPCRSPSLGIIR

SEQ ID NO: 4151 - protein, 23 aa, synthetic construct
  REGION 1..23: note = ATaRI peptide
AEKTDFYQVFPTGNTLLMASFSP

SEQ ID NO: 4152 - protein, 9 aa, synthetic construct
  REGION 1..9: note = ATaRI peptide
FQMDTSCVQ

SEQ ID NO: 4153 - protein, 16 aa, synthetic construct
  REGION 1..16: note = ATaRI peptide
KTMFKDLMSKFCVTFA

SEQ ID NO: 4154 - protein, 9 aa, synthetic construct
  REGION 1..9: note = ATaRI peptide
PDKMPLFQM

SEQ ID NO: 4155 - protein, 10 aa, synthetic construct
  REGION 1..10: note = ATaRI peptide
FSAVAELIGM

SEQ ID NO: 4156 - protein, 9 aa, synthetic construct
  REGION 1..9: note = ATaRI peptide
SDKLHKMLR

SEQ ID NO: 4157 - protein, 15 aa, synthetic construct
  REGION 1..15: note = ATaRI peptide
PIVAFNKHHILLVVK

SEQ ID NO: 4158 - protein, 9 aa, synthetic construct
  REGION 1..9: note = ATaRI peptide
RLHPCVDAK

SEQ ID NO: 4159 - protein, 9 aa, synthetic construct
  REGION 1..9: note = ATaRI peptide
PIKAFYENR

SEQ ID NO: 4160 - protein, 16 aa, synthetic construct
  REGION 1..16: note = ATaRI peptide
GKVYLKKNRLVEMTLL

SEQ ID NO: 4161 - protein, 17 aa, synthetic construct
  REGION 1..17: note = ATaRI peptide
YITDPDFKVNNECTVGH

SEQ ID NO: 4162 - protein, 15 aa, synthetic construct
  REGION 1..15: note = ATaRI peptide
TFNDKIDKVKHNRIV

SEQ ID NO: 4163 - protein, 19 aa, synthetic construct
  REGION 1..19: note = ATaRI peptide
SGGEVKCEVSNKGETLLDR

SEQ ID NO: 4164 - protein, 9 aa, synthetic construct
  REGION 1..9: note = ATaRI peptide
KKVSNASEM

SEQ ID NO: 4165 - protein, 13 aa, synthetic construct
  REGION 1..13: note = ATaRI peptide
AEDVPVRIVCITV

SEQ ID NO: 4166 - protein, 28 aa, synthetic construct
  REGION 1..28: note = ATaRI peptide
CGHKYHKGVRALFGHPYSMHWDLQIFSK

SEQ ID NO: 4167 - protein, 14 aa, synthetic construct
  REGION 1..14: note = ATaRI peptide
KTYKHINEVRLDLL

SEQ ID NO: 4168 - protein, 17 aa, synthetic construct
  REGION 1..17: note = ATaRI peptide
SSCQLGQRVSIISELVN

SEQ ID NO: 4169 - protein, 25 aa, synthetic construct
  REGION 1..25: note = ATaRI peptide
SLNLDCREVFMLWSLLCLSVYVWVP

SEQ ID NO: 4170 - protein, 88 aa, synthetic construct
  REGION 1..88: note = ATaRI peptide
GVALPRGSGKNLHSVLVCSGCHNKIPQTGWLIQQKFIFSQFWRLEVQNQGLASPEAFLHGLQMATSSPLPHAAFLPHTSISAVSSPSS

SEQ ID NO: 4171 - protein, 125 aa, synthetic construct
  REGION 1..125: note = ATaRI peptide
TDCGWAPFGKSIIGPSRSRSGCPSSLAINHFSSSNAVPRCNCISMTALSYQKAHDFTATVSTVPVRRAVPPERRFSLWGNVLKIICILYFGLAGHSSVGEKKRETRGAGVGAGLGRCAAEKPVDT

SEQ ID NO: 4172 - protein, 9 aa, synthetic construct
  REGION 1..9: note = ATaRI peptide
AYAVGMYLR

SEQ ID NO: 4173 - protein, 23 aa, synthetic construct
  REGION 1..23: note = ATaRI peptide
FGFYVVTQVRVWIRGSPCTGFPW

SEQ ID NO: 4174 - protein, 35 aa, synthetic construct
  REGION 1..35: note = ATaRI peptide
VCFLFLIERKCTWPWRPPTKGGLGFPCLGGPWGRV

SEQ ID NO: 4175 - protein, 38 aa, synthetic construct
  REGION 1..38: note = ATaRI peptide
KSEKNKPLVSHTQLPLPRMSELQENSFEPRRLSVPLPM

SEQ ID NO: 4176 - protein, 13 aa, synthetic construct
  REGION 1..13: note = ATaRI peptide
LPLYITNVGEYPR

SEQ ID NO: 4177 - protein, 42 aa, synthetic construct
  REGION 1..42: note = ATaRI peptide
MLLLAAPTVSRAAFPGPQSLQTVPHCPPRQPASFHLARAPLS

SEQ ID NO: 4178 - protein, 35 aa, synthetic construct
  REGION 1..35: note = ATaRI peptide
TTAVSADLVSRTGRDTSPVGTLPCAIHDKSGLHYC

SEQ ID NO: 4179 - protein, 9 aa, synthetic construct
  REGION 1..9: note = ATaRI peptide
WTSMDAFRR

SEQ ID NO: 4180 - protein, 9 aa, synthetic construct
  REGION 1..9: note = ATaRI peptide
PTMPANSER

SEQ ID NO: 4181 - protein, 9 aa, synthetic construct
  REGION 1..9: note = ATaRI peptide
EELAARSSR

SEQ ID NO: 4182 - protein, 10 aa, synthetic construct
  REGION 1..10: note = ATaRI peptide
RDVPTYPKVR

SEQ ID NO: 4183 - protein, 87 aa, synthetic construct
  REGION 1..87: note = ATaRI peptide
DGFKQIRQVCGVRALPPEWGHIQGQSSPHSPLAGSSQKLLATAVPWGPKGTPPSFLTSSRAQSGAPKRGYPRHAHVHPTDLHFPACI

SEQ ID NO: 4184 - protein, 49 aa, synthetic construct
  REGION 1..49: note = ATaRI peptide
SNEEHMTLVSGLFCLGGQPGGGLAKQVIHPAHTGSQEAEIISLLGTRCL

SEQ ID NO: 4185 - protein, 30 aa, synthetic construct
  REGION 1..30: note = ATaRI peptide
EDPETDNLVSKINFIFSFQNVKSVHEILGF

SEQ ID NO: 4186 - protein, 26 aa, synthetic construct
  REGION 1..26: note = ATaRI peptide
PYSPVQSQVLTFGGLAFPLCHCEHLH

SEQ ID NO: 4187 - protein, 42 aa, synthetic construct
  REGION 1..42: note = ATaRI peptide
VQDEPLLQVTCVPFVMLPGSCCGWIRDLITHAVPVPRYTDAH

SEQ ID NO: 4188 - protein, 24 aa, synthetic construct
  REGION 1..24: note = ATaRI peptide
HAVNNSAARKSCCFFSFLPSFPTC

SEQ ID NO: 4189 - protein, 45 aa, synthetic construct
  REGION 1..45: note = ATaRI peptide
LRLDKYYMVRSAAVTSKTPGKKRMSFILKTMGRFICEAKQATGLV

SEQ ID NO: 4190 - protein, 43 aa, synthetic construct
  REGION 1..43: note = ATaRI peptide
LSKVGGKEVSSCRQAAHGVRGPPVFAVVASEVLWGGPSHDQRL

SEQ ID NO: 4191 - protein, 22 aa, synthetic construct
  REGION 1..22: note = ATaRI peptide
KRLSKLIKKSVTGERVLTSSFL

SEQ ID NO: 4192 - protein, 49 aa, synthetic construct
  REGION 1..49: note = ATaRI peptide
EAGQPQALVRWEHPQASSPQRHSLASMGLHCLLRGRVGAGGQASGLSSS

SEQ ID NO: 4193 - protein, 27 aa, synthetic construct
  REGION 1..27: note = ATaRI peptide
HPPGPAVQVRTLPRVAQHISPQGHRWA

SEQ ID NO: 4194 - protein, 39 aa, synthetic construct
  REGION 1..39: note = ATaRI peptide
IVLGSQRRSKCPHRAPWPPLLFPEEGVLWGCKNVLGSIA

SEQ ID NO: 4195 - protein, 74 aa, synthetic construct
  REGION 1..74: note = ATaRI peptide
MQDKPLLQVSGGSSRAGTEAAGEDGWASGQPSFSFFFKSEFRSCCPGWSAVAQSRLTATSAFWFQAIFLPQPPK

SEQ ID NO: 4196 - protein, 38 aa, synthetic construct
  REGION 1..38: note = ATaRI peptide
LLRLQQERGRTRGCVSHGAGVLTCLLLPWMGVTCSVSP

SEQ ID NO: 4197 - protein, 28 aa, synthetic construct
  REGION 1..28: note = ATaRI peptide
CERFGVLGVSGDLGRATGEQEGPGEGRG

SEQ ID NO: 4198 - protein, 27 aa, synthetic construct
  REGION 1..27: note = ATaRI peptide
SDYPEYMWVSARSSPIPCMPGGGHANS

SEQ ID NO: 4199 - protein, 19 aa, synthetic construct
  REGION 1..19: note = ATaRI peptide
SRLHSSPQVKIRKPSPAAA

SEQ ID NO: 4200 - protein, 19 aa, synthetic construct
  REGION 1..19: note = ATaRI peptide
EAFEKHYLVSINKCSMSVL

SEQ ID NO: 4201 - protein, 37 aa, synthetic construct
  REGION 1..37: note = ATaRI peptide
NQITFRTQVCVQGGNLTFKFVKQGRGAYKNCLECAVN

SEQ ID NO: 4202 - protein, 35 aa, synthetic construct
  REGION 1..35: note = ATaRI peptide
QLHVEPLAGEWGPQPLRRRAAGAVLRRPAEMPGFS

SEQ ID NO: 4203 - protein, 12 aa, synthetic construct
  REGION 1..12: note = ATaRI peptide
PLNTQSQQVNIV

SEQ ID NO: 4204 - protein, 27 aa, synthetic construct
  REGION 1..27: note = ATaRI peptide
KHCVKEVVISFLVARPGPLSCLSLRRA

SEQ ID NO: 4205 - protein, 16 aa, synthetic construct
  REGION 1..16: note = ATaRI peptide
LLEELVAEGGSVPGAL

SEQ ID NO: 4206 - protein, 45 aa, synthetic construct
  REGION 1..45: note = ATaRI peptide
RIVEWTKKVRLTGTTVTSMWLLCRDTVSLVGRTRTHGPMRRTHWV

SEQ ID NO: 4207 - protein, 62 aa, synthetic construct
  REGION 1..62: note = ATaRI peptide
SAGLGRGEGELGRRWPGAAAWVRGRVSCGAPPPGGFRDPGLPSGSAGICCATDATFLLREAS

SEQ ID NO: 4208 - protein, 9 aa, synthetic construct
  REGION 1..9: note = ATaRI peptide
AGSRRQARR

SEQ ID NO: 4209 - protein, 9 aa, synthetic construct
  REGION 1..9: note = ATaRI peptide
SAAQRQQLL

SEQ ID NO: 4210 - protein, 14 aa, synthetic construct
  REGION 1..14: note = ATaRI peptide
GPGLPAGFVSTAYT

SEQ ID NO: 4211 - protein, 220 aa, synthetic construct
  REGION 1..220: note = ATaRI peptide
VPGLPGAKVSAVPGFRDVARQRQGGPSRTPAEISSGRPSPLFLPLLCFFIIEDVLVSKATPRIPTCRAPNPRAPPGLTASGTWPSSLPAVWLCRPRRPLPPASRLSLLFPDFPLPHTASPTCPSPTPPPRLPPPPLPPAPHLLPDFPLPHFPLPHTSSPTPSPTSPSPTPPPPHPPPLPRPPHLLPHSPRLPPPPDSPLPLTPPSPTPPSLHSPCSGPQG

SEQ ID NO: 4212 - protein, 9 aa, synthetic construct
  REGION 1..9: note = ATaRI peptide
MCFLFHFMR

SEQ ID NO: 4213 - protein, 30 aa, synthetic construct
  REGION 1..30: note = ATaRI peptide
AGGAFAAQVDLLNVVFEHFAYLLVISSVIY

SEQ ID NO: 4214 - protein, 15 aa, synthetic construct
  REGION 1..15: note = ATaRI peptide
SEKEKQLEVGSSFVI

SEQ ID NO: 4215 - protein, 21 aa, synthetic construct
  REGION 1..21: note = ATaRI peptide
RTSRQELSGEELYWKIQILKS

SEQ ID NO: 4216 - protein, 56 aa, synthetic construct
  REGION 1..56: note = ATaRI peptide
RLKDDLEKVSRDSTAQRLPPESLLSSTWKACVLVYGGASWGQPSAVHGTFVRATVP

SEQ ID NO: 4217 - protein, 22 aa, synthetic construct
  REGION 1..22: note = ATaRI peptide
MALDSSRQVRPRLPGSCGDVNN

SEQ ID NO: 4218 - protein, 44 aa, synthetic construct
  REGION 1..44: note = ATaRI peptide
TDAEAREAGKERGLWRVVRAVGRGYSCHGFPSSQGHSVSLEGQV

SEQ ID NO: 4219 - protein, 27 aa, synthetic construct
  REGION 1..27: note = ATaRI peptide
EPVVPDPQVGSPRGPWQGIFFYSPFLL

SEQ ID NO: 4220 - protein, 158 aa, synthetic construct
  REGION 1..158: note = ATaRI peptide
LSLEDGGKVWGGGKARGPPGRGWTRGSKVWGAGKARGPPGRGWTRGSKVWGAGKARGPPGRGWTRGSKVWGAGKARGPPGRGWTRSSKVWGGGRREAPLGEAGHAAARCGERGRHEAHPGEAGHAAARCGEGGRREAPLGEAGCRTCGSCPGQRRVFC

SEQ ID NO: 4221 - protein, 38 aa, synthetic construct
  REGION 1..38: note = ATaRI peptide
HHVQRTAVVGACSAPRPAVPVGMWSARRHGSCHCLFTS

SEQ ID NO: 4222 - protein, 117 aa, synthetic construct
  REGION 1..117: note = ATaRI peptide
EVRPKHVKVWLAGAALTASHVQPRGIPQALCPALPGRALEGQLFLGASEHLHFNDSREAAPRWPRKPPTQPCTGPLGGRLPSGQGGSCEPVGRWCCPESQSRPVPLSRLCLPPACAL

SEQ ID NO: 4223 - protein, 21 aa, synthetic construct
  REGION 1..21: note = ATaRI peptide
SLHGGKTQVYFALHTLLFQRI

SEQ ID NO: 4224 - protein, 55 aa, synthetic construct
  REGION 1..55: note = ATaRI peptide
LSRPTSSQVRGERPQVPGLAPPPEGPSRQLCGSFSRFPIVLPPSLPSLNSWLLSG

SEQ ID NO: 4225 - protein, 11 aa, synthetic construct
  REGION 1..11: note = ATaRI peptide
AASPHSGGRSV

SEQ ID NO: 4226 - protein, 13 aa, synthetic construct
  REGION 1..13: note = ATaRI peptide
SRDERFRSGRVTA

SEQ ID NO: 4227 - protein, 21 aa, synthetic construct
  REGION 1..21: note = ATaRI peptide
IEVPLTRKVANPWLRSRVVRF

SEQ ID NO: 4228 - protein, 128 aa, synthetic construct
  REGION 1..128: note = ATaRI peptide
GTGTAYIEVMTVPNLENVKTCPTGLSLAFHKNVSCYSFLLSFGLRVLVLSLPWKYRVSYKSLLRSFQVSLSSNSLLTGSLGMQTVMREPMAHHYPRAPAQEEPQLPLKHPLSGQGFAMYLGCWLEADG

SEQ ID NO: 4229 - protein, 22 aa, synthetic construct
  REGION 1..22: note = ATaRI peptide
DVGQVMPGGKRHNQSGSLSMTD

SEQ ID NO: 4230 - protein, 13 aa, synthetic construct
  REGION 1..13: note = ATaRI peptide
GITKNVFEVCPFS

SEQ ID NO: 4231 - protein, 9 aa, synthetic construct
  REGION 1..9: note = ATaRI peptide
PKPRQKQPG

SEQ ID NO: 4232 - protein, 9 aa, synthetic construct
  REGION 1..9: note = ATaRI peptide
RLGKLAEQV

SEQ ID NO: 4233 - protein, 37 aa, synthetic construct
  REGION 1..37: note = ATaRI peptide
LGDSHLGEVSRGPWEGLELSSLTSFTFLPFLLQILEF

SEQ ID NO: 4234 - protein, 13 aa, synthetic construct
  REGION 1..13: note = ATaRI peptide
TELTDASGGEGLW

SEQ ID NO: 4235 - protein, 9 aa, synthetic construct
  REGION 1..9: note = ATaRI peptide
VLSTGPFHP

SEQ ID NO: 4236 - protein, 127 aa, synthetic construct
  REGION 1..127: note = ATaRI peptide
RPHHAAGQVSRGRSGGAAVRGGVARPARPQLGSDAGPAGLAWRCRAGSAGPRSGRRRRRGGRRGVDGSGRRGLAPGPMAGRTAVRGRARGRGPCQGRRTANAGRREGRRAHPARRGTGAAPSTPWHC

SEQ ID NO: 4237 - protein, 42 aa, synthetic construct
  REGION 1..42: note = ATaRI peptide
VEVTLHVAGRTIEAGRARSIPASHRGQVFMKPPPWLIHCFFQ

SEQ ID NO: 4238 - protein, 16 aa, synthetic construct
  REGION 1..16: note = ATaRI peptide
NLTVGSQTGKVPAPAC

SEQ ID NO: 4239 - protein, 43 aa, synthetic construct
  REGION 1..43: note = ATaRI peptide
RGIESPKRRCVGAVGPSRRGLPTGPGATRPLAGGPHADSLLQA

SEQ ID NO: 4240 - protein, 30 aa, synthetic construct
  REGION 1..30: note = ATaRI peptide
RIPFFMSQGESCGLAWAGACVSCSPFVAGF

SEQ ID NO: 4241 - protein, 31 aa, synthetic construct
  REGION 1..31: note = ATaRI peptide
ASDTSLTQGEPRSSHTYLHLPQGTMCVSGST

SEQ ID NO: 4242 - protein, 68 aa, synthetic construct
  REGION 1..68: note = ATaRI peptide
KLRHHHRRVRTQLLSGLCSTDDTSTDFLSPNSDPDLEWGRPRGAEGVCGIQNGSLRWAEVKREVVWPP

SEQ ID NO: 4243 - protein, 70 aa, synthetic construct
  REGION 1..70: note = ATaRI peptide
QSKNFLVPGKSILPRHSLPNGLCEKEAPGGTDASPPAQQDIGWHCQHLGPTEQTEAKTGSALVCAATSIP

SEQ ID NO: 4244 - protein, 18 aa, synthetic construct
  REGION 1..18: note = ATaRI peptide
EHMHHIPAVTLLFLTPLA

SEQ ID NO: 4245 - protein, 21 aa, synthetic construct
  REGION 1..21: note = ATaRI peptide
VCMTWRLAGKRWGSGCPGVRL

SEQ ID NO: 4246 - protein, 22 aa, synthetic construct
  REGION 1..22: note = ATaRI peptide
SQGLGLPSWSLDPSRFPLLDCM

SEQ ID NO: 4247 - protein, 19 aa, synthetic construct
  REGION 1..19: note = ATaRI peptide
CLQKCNVPCKIPSHWAPGC

SEQ ID NO: 4248 - protein, 10 aa, synthetic construct
  REGION 1..10: note = ATaRI peptide
ESCDAEEQVG

SEQ ID NO: 4249 - protein, 9 aa, synthetic construct
  REGION 1..9: note = ATaRI peptide
DSATEGSHR

SEQ ID NO: 4250 - protein, 17 aa, synthetic construct
  REGION 1..17: note = ATaRI peptide
LDWQARGRGKASGVGPR

SEQ ID NO: 4251 - protein, 23 aa, synthetic construct
  REGION 1..23: note = ATaRI peptide
EVCKDESVGEFLKDSSLLASWDP

SEQ ID NO: 4252 - protein, 95 aa, synthetic construct
  REGION 1..95: note = ATaRI peptide
EVPRGPCPGEQRHRWKGASPSTPGGTSSYGPYFPPSVCPGSISPFQVPRQTLLPASLQHVLSTACVLRPVLGYNREQTWPLGPNGHLLMGMGRQE

SEQ ID NO: 4253 - protein, 91 aa, synthetic construct
  REGION 1..91: note = ATaRI peptide
NLRKLDDTGKWIPVCTATFEFWGETSRFGVGPWGAVATSLGRWAGAPAAGITHASQRALGTPHALAELGVCIMVGLLLLSLPPSMERRTRK

SEQ ID NO: 4254 - protein, 33 aa, synthetic construct
  REGION 1..33: note = ATaRI peptide
HQKIDSNLGKTEHHTSFCKPLSFRQLTPSIAPA

SEQ ID NO: 4255 - protein, 46 aa, synthetic construct
  REGION 1..46: note = ATaRI peptide
RQDIITLQVSVPCLPAPAAFSTCSQPRPLQGPTPTSGPLISVLKAT

SEQ ID NO: 4256 - protein, 23 aa, synthetic construct
  REGION 1..23: note = ATaRI peptide
KTTLGWKYVSATRGCSCHKGMWH

SEQ ID NO: 4257 - protein, 33 aa, synthetic construct
  REGION 1..33: note = ATaRI peptide
RVIASFPKVESHYVCSALLALQPHQLSPLYTHA

SEQ ID NO: 4258 - protein, 9 aa, synthetic construct
  REGION 1..9: note = ATaRI peptide
QRRNTGTVG

SEQ ID NO: 4259 - protein, 110 aa, synthetic construct
  REGION 1..110: note = ATaRI peptide
YWSVSAKTGEWARAVTMVGQSPALGPVLWGLPCSVSLCSQSSVPSVALVHTGITALLCWCLAALSLPKRSCVISRRKLGGLPHGWGNSDPNPVSCRAGLFSITGEPHNYS

SEQ ID NO: 4260 - protein, 24 aa, synthetic construct
  REGION 1..24: note = ATaRI peptide
GALESTKAVSPHGVRVAGGPGEAP

SEQ ID NO: 4261 - protein, 11 aa, synthetic construct
  REGION 1..11: note = ATaRI peptide
AQFAEISEVMP

SEQ ID NO: 4262 - protein, 16 aa, synthetic construct
  REGION 1..16: note = ATaRI peptide
KTQTKEAQVRNARSSL

SEQ ID NO: 4263 - protein, 9 aa, synthetic construct
  REGION 1..9: note = ATaRI peptide
DSLRMFLKW

SEQ ID NO: 4264 - protein, 13 aa, synthetic construct
  REGION 1..13: note = ATaRI peptide
LEEHSAQQVRVLQ

SEQ ID NO: 4265 - protein, 12 aa, synthetic construct
  REGION 1..12: note = ATaRI peptide
LQGATEERGMKP

SEQ ID NO: 4266 - protein, 9 aa, synthetic construct
  REGION 1..9: note = ATaRI peptide
LQRTPDQGK

SEQ ID NO: 4267 - protein, 58 aa, synthetic construct
  REGION 1..58: note = ATaRI peptide
ETYMLIKQVGGRQRPGGTSLLAASPLLPFYPQGGSPRPALGAGFRCCSHTIPAVHFLQ

SEQ ID NO: 4268 - protein, 37 aa, synthetic construct
  REGION 1..37: note = ATaRI peptide
GAEPTCSQGKASWEQPSTSPQEAASQLAARVGFPAWP

SEQ ID NO: 4269 - protein, 16 aa, synthetic construct
  REGION 1..16: note = ATaRI peptide
RVLYGKELRSAAKRLS

SEQ ID NO: 4270 - protein, 48 aa, synthetic construct
  REGION 1..48: note = ATaRI peptide
ANAPVAEQVQTLLTIINTQTGLWPALGAHLQALAGRILRVCRLGRLKQ

SEQ ID NO: 4271 - protein, 44 aa, synthetic construct
  REGION 1..44: note = ATaRI peptide
CAINRVGTVSPEVWLGRGATTWWLWWGHPVPSAHMPQILGSGKG

SEQ ID NO: 4272 - protein, 47 aa, synthetic construct
  REGION 1..47: note = ATaRI peptide
FTSGDGKKGMSHEPWWLQLRSGPSSPLLCLLPPVRICHTDHICMPGT

SEQ ID NO: 4273 - protein, 50 aa, synthetic construct
  REGION 1..50: note = ATaRI peptide
VNDVWNFKVGPQDPCCCLLLCFGPHPALRNCCCGVAHGSMRYQLPPEGSV

SEQ ID NO: 4274 - protein, 53 aa, synthetic construct
  REGION 1..53: note = ATaRI peptide
VTVLSENEVSGLKGSRQNCKNPDQTHPRPCLWTPAFFAVAAIPLLPPAHFCSA

SEQ ID NO: 4275 - protein, 32 aa, synthetic construct
  REGION 1..32: note = ATaRI peptide
DFFSQRSQVAYWPTPIIPKYVCTLGGSSLVVM

SEQ ID NO: 4276 - protein, 11 aa, synthetic construct
  REGION 1..11: note = ATaRI peptide
KEIESIVKGER

SEQ ID NO: 4277 - protein, 16 aa, synthetic construct
  REGION 1..16: note = ATaRI peptide
NVSSAFEQGTFFSSLS

SEQ ID NO: 4278 - protein, 9 aa, synthetic construct
  REGION 1..9: note = ATaRI peptide
FTKKMIESM

SEQ ID NO: 4279 - protein, 50 aa, synthetic construct
  REGION 1..50: note = ATaRI peptide
RIQHRPPRVSLRTIWHRLGAFSATTCPFISLGLSFLSLSEMLAYPRFLQA

SEQ ID NO: 4280 - protein, 18 aa, synthetic construct
  REGION 1..18: note = ATaRI peptide
KLKQRRSQVVPLCVAREQ

SEQ ID NO: 4281 - protein, 21 aa, synthetic construct
  REGION 1..21: note = ATaRI peptide
LEKYIDGEVMAEAGPSWVGKT

SEQ ID NO: 4282 - protein, 15 aa, synthetic construct
  REGION 1..15: note = ATaRI peptide
STTATEAAGESRKWQ

SEQ ID NO: 4283 - protein, 50 aa, synthetic construct
  REGION 1..50: note = ATaRI peptide
TSYGQPPTGKACLGEIFGSFWLGHWLRSLLVMLSDVYSGPYLGIWGILYS

SEQ ID NO: 4284 - protein, 69 aa, synthetic construct
  REGION 1..69: note = ATaRI peptide
KAAVEWFDGEMYSLAFLISLAIEYGMREKLVNHRSKKTFHLFLGEVDGRSPCSSSSTQPLTLDLEIPLF

SEQ ID NO: 4285 - protein, 108 aa, synthetic construct
  REGION 1..108: note = ATaRI peptide
GMPPPLRGGTFSELLCCIKRFSVHFIPLRNLIIRVKKYKIVCRVNTRLSRANNECLLGIKGREEHGRLEATLPVNSRLPFIQLWLCLYRHAYSLQNCGSSARCSGSRL

SEQ ID NO: 4286 - protein, 40 aa, synthetic construct
  REGION 1..40: note = ATaRI peptide
SFPSSWDYRYAPPRPTSFCIFSRDGVSPCWPGWSRTPDLR

SEQ ID NO: 4287 - protein, 27 aa, synthetic construct
  REGION 1..27: note = ATaRI peptide
AWLKMDKKVGLELDETGGADVSFPVFP

SEQ ID NO: 4288 - protein, 54 aa, synthetic construct
  REGION 1..54: note = ATaRI peptide
TQHLFFLQVHQSRLPPSSERTCPGVVAELASELTTNTFVLQKYSTSGRSAPLVL

SEQ ID NO: 4289 - protein, 9 aa, synthetic construct
  REGION 1..9: note = ATaRI peptide
YAEHRGRAR

SEQ ID NO: 4290 - protein, 10 aa, synthetic construct
  REGION 1..10: note = ATaRI peptide
GVNYFAIRVC

SEQ ID NO: 4291 - protein, 66 aa, synthetic construct
  REGION 1..66: note = ATaRI peptide
NISYSDKEVGHVCTADGSSRSFPVCPPHWSLPSQGISLLFIESFNSQALRVWLLIFEVFTEQYWHQ

SEQ ID NO: 4292 - protein, 10 aa, synthetic construct
  REGION 1..10: note = ATaRI peptide
SKLRVNKLVS

SEQ ID NO: 4293 - protein, 9 aa, synthetic construct
  REGION 1..9: note = ATaRI peptide
KMAEESERR

SEQ ID NO: 4294 - protein, 23 aa, synthetic construct
  REGION 1..23: note = ATaRI peptide
SKHNTIKKVPRVSFLYFADQDHH

SEQ ID NO: 4295 - protein, 9 aa, synthetic construct
  REGION 1..9: note = ATaRI peptide
PRTQVGSAK

SEQ ID NO: 4296 - protein, 49 aa, synthetic construct
  REGION 1..49: note = ATaRI peptide
GTTRSTSLVSASGLVGGVVLSQALPPLDFRYVTTFSEPQFIYLDRGLGH

SEQ ID NO: 4297 - protein, 9 aa, synthetic construct
  REGION 1..9: note = ATaRI peptide
SSSSKKMGR

SEQ ID NO: 4298 - protein, 9 aa, synthetic construct
  REGION 1..9: note = ATaRI peptide
FEVAFSSAE

SEQ ID NO: 4299 - protein, 9 aa, synthetic construct
  REGION 1..9: note = ATaRI peptide
GSTGQQDPR

SEQ ID NO: 4300 - protein, 14 aa, synthetic construct
  REGION 1..14: note = ATaRI peptide
INDGRPPPGKTLFP

SEQ ID NO: 4301 - protein, 9 aa, synthetic construct
  REGION 1..9: note = ATaRI peptide
LVQHATLYW

SEQ ID NO: 4302 - protein, 9 aa, synthetic construct
  REGION 1..9: note = ATaRI peptide
YATTVQVKE

SEQ ID NO: 4303 - protein, 49 aa, synthetic construct
  REGION 1..49: note = ATaRI peptide
VRTLRVEEVECVSNLSCEGGTWNRSSEKSGCSLYLFLPPAHLFVLALSL

SEQ ID NO: 4304 - protein, 25 aa, synthetic construct
  REGION 1..25: note = ATaRI peptide
GTLRRRSLRCHLPPWLCSVLCLSLG

SEQ ID NO: 4305 - protein, 72 aa, synthetic construct
  REGION 1..72: note = ATaRI peptide
GFFGQAIKVSAGNNCFALLPPVPLSLSFGDFSSLGPTPHHAGCQASFLALGVGVRGILHPHPGHLRSMLLLQ

SEQ ID NO: 4306 - protein, 29 aa, synthetic construct
  REGION 1..29: note = ATaRI peptide
TQKTFLTEVRRWRGPGRLVSPLEERRPYK

SEQ ID NO: 4307 - protein, 33 aa, synthetic construct
  REGION 1..33: note = ATaRI peptide
AKGIASGMVSPTNKPASRARVGRGVRIVGFTGR

SEQ ID NO: 4308 - protein, 38 aa, synthetic construct
  REGION 1..38: note = ATaRI peptide
SFGIVLCEVSSGTKAMPEAAGLAALPSLGTGASPPRDD

SEQ ID NO: 4309 - protein, 39 aa, synthetic construct
  REGION 1..39: note = ATaRI peptide
AHQQHGVTVRVVFCIKGPLLKAILSRSFFQSCQIKQNSF

SEQ ID NO: 4310 - protein, 13 aa, synthetic construct
  REGION 1..13: note = ATaRI peptide
TQKRRYKQVWSTF

SEQ ID NO: 4311 - protein, 9 aa, synthetic construct
  REGION 1..9: note = ATaRI peptide
YQTTKQNLW

SEQ ID NO: 4312 - protein, 41 aa, synthetic construct
  REGION 1..41: note = ATaRI peptide
FLYLRDFRGDFRNDIFTRKGSYCLDYSAHQKFLVVGFFCCK

SEQ ID NO: 4313 - protein, 14 aa, synthetic construct
  REGION 1..14: note = ATaRI peptide
VQDTDWKEVGIFKY

SEQ ID NO: 4314 - protein, 15 aa, synthetic construct
  REGION 1..15: note = ATaRI peptide
IVADHPGIGKNITDL

SEQ ID NO: 4315 - protein, 53 aa, synthetic construct
  REGION 1..53: note = ATaRI peptide
GHRLQETEVNTTISSMTTVSHIVSHIILIHSLILHTCIEHLLYAKLCQVLRMA

SEQ ID NO: 4316 - protein, 35 aa, synthetic construct
  REGION 1..35: note = ATaRI peptide
NGCPKQVLVSFPWIFRVRSIGRQRCPALMSTVRHT

SEQ ID NO: 4317 - protein, 19 aa, synthetic construct
  REGION 1..19: note = ATaRI peptide
PADLELLQVSRWHHPLGLR

SEQ ID NO: 4318 - protein, 12 aa, synthetic construct
  REGION 1..12: note = ATaRI peptide
VVISSTEEGERT

SEQ ID NO: 4319 - protein, 9 aa, synthetic construct
  REGION 1..9: note = ATaRI peptide
YALPRKCNT

SEQ ID NO: 4320 - protein, 62 aa, synthetic construct
  REGION 1..62: note = ATaRI peptide
ARPQSCHPWFVAWRCWREGWSEEGAHLLILGLEPSFRLIISTHQSFSSDLGLGGEALRGEES

SEQ ID NO: 4321 - protein, 89 aa, synthetic construct
  REGION 1..89: note = ATaRI peptide
AGDSASRAGEDRCLMLKQGSQPGSPPATLSLQHLLSTKPRASPAQNPQEPMSPLTLHTTPQSILLQSTRPPVLPQPRAVRPREALCHKS

SEQ ID NO: 4322 - protein, 9 aa, synthetic construct
  REGION 1..9: note = ATaRI peptide
RDQWIESIR

SEQ ID NO: 4323 - protein, 67 aa, synthetic construct
  REGION 1..67: note = ATaRI peptide
LIKVVSPKVGAPSPSSDLPCRMWGEERGPSDCGATFPGSLPLGCHLSPPLELRPRKNTDLFSQSSHT

SEQ ID NO: 4324 - protein, 85 aa, synthetic construct
  REGION 1..85: note = ATaRI peptide
LIKEMVQEVAAEPRAQGGGGMGVLSWATEMGLYASSHGRSPAVTRAGTAEKLMLGDQGVQGRIPGSLGDLLWMGLWEAGYLFVKS

SEQ ID NO: 4325 - protein, 48 aa, synthetic construct
  REGION 1..48: note = ATaRI peptide
DATAGSIPGEEVAGELGGHPSGWRGTESAGWCAGLRAAGMTARVTLAP

SEQ ID NO: 4326 - protein, 49 aa, synthetic construct
  REGION 1..49: note = ATaRI peptide
GHEALEKEVGTTAGSLGGPLPQRPSSPCIHALAFVLHSYSDGELTPDLL

SEQ ID NO: 4327 - protein, 60 aa, synthetic construct
  REGION 1..60: note = ATaRI peptide
DELQMMQKVGPSAGLGAVGDSGAIWMPSCEHLLCAKPSTRFILPQALLCFSHVGVIIPIH

SEQ ID NO: 4328 - protein, 63 aa, synthetic construct
  REGION 1..63: note = ATaRI peptide
VEPEDVAQVGRYLERWEGQGWRGRVMWTTIIAVTGSCEEVSPDSVQRVLVLCPCPIGFGNRCP

SEQ ID NO: 4329 - protein, 26 aa, synthetic construct
  REGION 1..26: note = ATaRI peptide
AGSSSLVNGEQGAVRAGGTGWQCTVY

SEQ ID NO: 4330 - protein, 103 aa, synthetic construct
  REGION 1..103: note = ATaRI peptide
SSPQLQVKVSAPSPSLKVTSSLVDAGLVSGQKCPGPFLNFFEMESLSVTQAGVQWRDLGSLQALPPGFTPFSCLSPQVAGTTGAHHHARLIFCIFSRVGFSPR

SEQ ID NO: 4331 - protein, 24 aa, synthetic construct
  REGION 1..24: note = ATaRI peptide
LRCLLNKPGECSHWHSPGTCPGAW

SEQ ID NO: 4332 - protein, 64 aa, synthetic construct
  REGION 1..64: note = ATaRI peptide
EALAGDEAGEHLNFGIGVGREGLVEGRVGVGTTRMAVHKLRSLCCAERAVCSKRGQHTARKAVA

SEQ ID NO: 4333 - protein, 9 aa, synthetic construct
  REGION 1..9: note = ATaRI peptide
LGTRALQIA

SEQ ID NO: 4334 - protein, 57 aa, synthetic construct
  REGION 1..57: note = ATaRI peptide
IYVIGQGSGEHSFPFTLFLKIIGPGAVALPPVIPALWEAKTGGSPEVRSSRPAWPTW

SEQ ID NO: 4335 - protein, 23 aa, synthetic construct
  REGION 1..23: note = ATaRI peptide
TASFALKKVSSDDTERSPQTPSC

SEQ ID NO: 4336 - protein, 30 aa, synthetic construct
  REGION 1..30: note = ATaRI peptide
DAKIFRGQVPPGLQSLCRQELSQLGKQTTH

SEQ ID NO: 4337 - protein, 9 aa, synthetic construct
  REGION 1..9: note = ATaRI peptide
HRTLKEILR

SEQ ID NO: 4338 - protein, 18 aa, synthetic construct
  REGION 1..18: note = ATaRI peptide
KRGVFRNQVAPKSYLHPK

SEQ ID NO: 4339 - protein, 9 aa, synthetic construct
  REGION 1..9: note = ATaRI peptide
DEATPTLTK

SEQ ID NO: 4340 - protein, 22 aa, synthetic construct
  REGION 1..22: note = ATaRI peptide
QFSNMGLLVSFIFFKCITYPNF

SEQ ID NO: 4341 - protein, 10 aa, synthetic construct
  REGION 1..10: note = ATaRI peptide
DSGPYFEKVS

SEQ ID NO: 4342 - protein, 58 aa, synthetic construct
  REGION 1..58: note = ATaRI peptide
TQDSRLASGEEDLPKGTPLFIHKGLMLTQMVKTQRGLPKRGSHGCLLFLLVEEKVPLE

SEQ ID NO: 4343 - protein, 23 aa, synthetic construct
  REGION 1..23: note = ATaRI peptide
QHLLPKMKGNKWEQKSHYKPDWD

SEQ ID NO: 4344 - protein, 19 aa, synthetic construct
  REGION 1..19: note = ATaRI peptide
KKRFEVKKVGSRQRLPQGS

SEQ ID NO: 4345 - protein, 9 aa, synthetic construct
  REGION 1..9: note = ATaRI peptide
LRNHLVHKL

SEQ ID NO: 4346 - protein, 20 aa, synthetic construct
  REGION 1..20: note = ATaRI peptide
MYESANNRVSVWFFSINSQD

SEQ ID NO: 4347 - protein, 15 aa, synthetic construct
  REGION 1..15: note = ATaRI peptide
LGYCCGRKVRNVFQI

SEQ ID NO: 4348 - protein, 9 aa, synthetic construct
  REGION 1..9: note = ATaRI peptide
KNDTLDPEL

SEQ ID NO: 4349 - protein, 9 aa, synthetic construct
  REGION 1..9: note = ATaRI peptide
HHEIIWPAG

SEQ ID NO: 4350 - protein, 9 aa, synthetic construct
  REGION 1..9: note = ATaRI peptide
AKHSFYNNK

SEQ ID NO: 4351 - protein, 10 aa, synthetic construct
  REGION 1..10: note = ATaRI peptide
PSETVSSTGW

SEQ ID NO: 4352 - protein, 60 aa, synthetic construct
  REGION 1..60: note = ATaRI peptide
KEAPYTLVVSGSDGAEAPMRRESRSAGLEAVSWGFCSGISPSRSGILFGGSWLVTSPWRA

SEQ ID NO: 4353 - protein, 32 aa, synthetic construct
  REGION 1..32: note = ATaRI peptide
ESLQQPAKLYPPRVKVVCHRELRPLQRKVPTP

SEQ ID NO: 4354 - protein, 48 aa, synthetic construct
  REGION 1..48: note = ATaRI peptide
PQDEKLKDGMVCPAPPCPPHHPIFSSCSFSPVLVTLFFSPEVPSCGTF

SEQ ID NO: 4355 - protein, 31 aa, synthetic construct
  REGION 1..31: note = ATaRI peptide
QNAATSFQGDSEVRMVVVGWFQCLCASLQTL

SEQ ID NO: 4356 - protein, 31 aa, synthetic construct
  REGION 1..31: note = ATaRI peptide
LVMGTDAKVGAKQNCVLCSTISPLPVFASGA

SEQ ID NO: 4357 - protein, 15 aa, synthetic construct
  REGION 1..15: note = ATaRI peptide
SPLLDDAKVQTFEIS

SEQ ID NO: 4358 - protein, 53 aa, synthetic construct
  REGION 1..53: note = ATaRI peptide
RSVLSFESGRWRPLAPPGHGWTTMAGEGPCVQTSWLGYQVPKGFYSGPPPACF

SEQ ID NO: 4359 - protein, 48 aa, synthetic construct
  REGION 1..48: note = ATaRI peptide
QADLDLARVSSVSALPHPPPDLTNNSATRVKESPMIDACGERKKGPCC

SEQ ID NO: 4360 - protein, 24 aa, synthetic construct
  REGION 1..24: note = ATaRI peptide
RTRTLLSSSEPWACPPHLCKLQGH

SEQ ID NO: 4361 - protein, 56 aa, synthetic construct
  REGION 1..56: note = ATaRI peptide
LYCAQRNPGENTLEPFRIGESHANRRYYRVTAPDTRRHGLSLNLVESVCLFVCLFV

SEQ ID NO: 4362 - protein, 80 aa, synthetic construct
  REGION 1..80: note = ATaRI peptide
SSVLKSALGKHLRVAHSLRVLSSGLHSAFAPGVQGVRSVDASIFSGSQVHTCGSSSQSPPPKQHSEAGNYGFQRSRAMSN

SEQ ID NO: 4363 - protein, 42 aa, synthetic construct
  REGION 1..42: note = ATaRI peptide
SFRPAYRKVRPSWLVGQGRLEPVGPEPRTQHGHQHVVVELAL

SEQ ID NO: 4364 - protein, 19 aa, synthetic construct
  REGION 1..19: note = ATaRI peptide
AILPKPVKVSVLLETGRRG

SEQ ID NO: 4365 - protein, 31 aa, synthetic construct
  REGION 1..31: note = ATaRI peptide
INVHDFKKVGEWVSLCFYPAEVQLFSYTNIL

SEQ ID NO: 4366 - protein, 9 aa, synthetic construct
  REGION 1..9: note = ATaRI peptide
EEDAFYSKK

SEQ ID NO: 4367 - protein, 9 aa, synthetic construct
  REGION 1..9: note = ATaRI peptide
TNRSEQKSR

SEQ ID NO: 4368 - protein, 41 aa, synthetic construct
  REGION 1..41: note = ATaRI peptide
RVDSTTLLGKADLSSCQPVFCLHIPLSSVTNCKIINVCFSP

SEQ ID NO: 4369 - protein, 10 aa, synthetic construct
  REGION 1..10: note = ATaRI peptide
LSVGMSHNGR

SEQ ID NO: 4370 - protein, 13 aa, synthetic construct
  REGION 1..13: note = ATaRI peptide
VAAIICCGGEWLI

SEQ ID NO: 4371 - protein, 10 aa, synthetic construct
  REGION 1..10: note = ATaRI peptide
LKAADPTFGE

SEQ ID NO: 4372 - protein, 21 aa, synthetic construct
  REGION 1..21: note = ATaRI peptide
WTPDIPLSRYVPAGNHIISVS

SEQ ID NO: 4373 - protein, 56 aa, synthetic construct
  REGION 1..56: note = ATaRI peptide
QAEKLAKEVSGSFLRCLTPQGVAVGWTRAYEGHHSCVTPANPIPGLTSSERLGSSC

SEQ ID NO: 4374 - protein, 10 aa, synthetic construct
  REGION 1..10: note = ATaRI peptide
WALYLIEKVR

SEQ ID NO: 4375 - protein, 152 aa, synthetic construct
  REGION 1..152: note = ATaRI peptide
MLYRLQMEGSHPCSPTGFCLFLPHHEERVLWPRPRVGQELMGEPLQTPLQAWPLPWVPFCSCLPAGPKLERVSRPHYSFFQFPPLLDVDASSSAPRAAPAVLFPWLACLPNLRGTGSTWPPVSMPPPFLKHERVSQLPGIVDRFLNLVMLCR

SEQ ID NO: 4376 - protein, 10 aa, synthetic construct
  REGION 1..10: note = ATaRI peptide
FHYAVDNLGK

SEQ ID NO: 4377 - protein, 29 aa, synthetic construct
  REGION 1..29: note = ATaRI peptide
RNRFEVRNGKFMCPGQSQILVNRLKSLEE

SEQ ID NO: 4378 - protein, 61 aa, synthetic construct
  REGION 1..61: note = ATaRI peptide
YTSAIAFTVSGSSRGRAGWVGCACQHSPHDQAPSQGGRWPPGGTSSGPRDMLISPSVKWAH

SEQ ID NO: 4379 - protein, 9 aa, synthetic construct
  REGION 1..9: note = ATaRI peptide
NGVLYVTEK

SEQ ID NO: 4380 - protein, 88 aa, synthetic construct
  REGION 1..88: note = ATaRI peptide
WEPQPDVGRWGSPGESQELASFSHGQPGCRPSMLACPFPSSFPHSPPAAGARPWPVLAPPQQAGAQSVGLVLGCCDPAGLHLSDKFLT

SEQ ID NO: 4381 - protein, 25 aa, synthetic construct
  REGION 1..25: note = ATaRI peptide
DTVYTDFDGERGRGAGNVPGALPAG

SEQ ID NO: 4382 - protein, 28 aa, synthetic construct
  REGION 1..28: note = ATaRI peptide
GLRQDVLHVSAGVPPRSRGQGCCRKPAG

SEQ ID NO: 4383 - protein, 43 aa, synthetic construct
  REGION 1..43: note = ATaRI peptide
IHPSQDEDVSVLLTELRASVQACAARSPTAAGQGAREGKSSLS

SEQ ID NO: 4384 - protein, 9 aa, synthetic construct
  REGION 1..9: note = ATaRI peptide
TLLETRRVG

SEQ ID NO: 4385 - protein, 15 aa, synthetic construct
  REGION 1..15: note = ATaRI peptide
QLLLNPPKVNGRGDC

SEQ ID NO: 4386 - protein, 9 aa, synthetic construct
  REGION 1..9: note = ATaRI peptide
AWEANDHTQ

SEQ ID NO: 4387 - protein, 147 aa, synthetic construct
  REGION 1..147: note = ATaRI peptide
THISEVIRGEPPTRSSFCWSRAPGPRRSCRLRLSSARQQVLTALTVRDPWPPLSSHFTHHISPRGGLGLMCQFYWADFCGDPARRQRVAQETVPPGVVGDSGAGTQKPLAPPGSLQLREPCLARLSWLCALHSGDWRVSFSLRCEIS

SEQ ID NO: 4388 - protein, 100 aa, synthetic construct
  REGION 1..100: note = ATaRI peptide
NRRNTVDLVRRLGAAPSVHARCWDAVRRSCLCPEAEAKGGTRAARLPAPLDYAVPLHSVSSGLMSVTETPSCATPRAGSLRTSVQSRCWPQVPFLPLQEL

SEQ ID NO: 4389 - protein, 60 aa, synthetic construct
  REGION 1..60: note = ATaRI peptide
PPVEGDSEGGAGRQGLGVWVSGTGHGTPAWVLWRLHLELRHLGLTVARSLNPQLFPSRPE

SEQ ID NO: 4390 - protein, 10 aa, synthetic construct
  REGION 1..10: note = ATaRI peptide
RSQGPEKACE

SEQ ID NO: 4391 - protein, 14 aa, synthetic construct
  REGION 1..14: note = ATaRI peptide
PEPASCVKVGVLGP

SEQ ID NO: 4392 - protein, 10 aa, synthetic construct
  REGION 1..10: note = ATaRI peptide
MRQHDTRPGE

SEQ ID NO: 4393 - protein, 33 aa, synthetic construct
  REGION 1..33: note = ATaRI peptide
DFHSLSTLVRGGGREERFCEMTRVAELSVLKNL

SEQ ID NO: 4394 - protein, 24 aa, synthetic construct
  REGION 1..24: note = ATaRI peptide
KAHLRTHTGKRWGRWGIGHTRPCG

SEQ ID NO: 4395 - protein, 28 aa, synthetic construct
  REGION 1..28: note = ATaRI peptide
QRILQQSVGEFTRFPLHLSGLGDGSLSL

SEQ ID NO: 4396 - protein, 18 aa, synthetic construct
  REGION 1..18: note = ATaRI peptide
SPSPEYLKCKFNFSGFTS

SEQ ID NO: 4397 - protein, 45 aa, synthetic construct
  REGION 1..45: note = ATaRI peptide
LLARCHQHREYHCPAQAWGPCVHSTGAQQQGSGTPEASARYLVSF

SEQ ID NO: 4398 - protein, 26 aa, synthetic construct
  REGION 1..26: note = ATaRI peptide
LSSPQQTQVCIDCKHFLIFFFKFIFN

SEQ ID NO: 4399 - protein, 42 aa, synthetic construct
  REGION 1..42: note = ATaRI peptide
PGHDDQLWVGGCFLSICGHSICLNCKGMAGVGAGERGGEEKQ

SEQ ID NO: 4400 - protein, 9 aa, synthetic construct
  REGION 1..9: note = ATaRI peptide
QAGQRNSTR

SEQ ID NO: 4401 - protein, 49 aa, synthetic construct
  REGION 1..49: note = ATaRI peptide
CAVLKGEVVSAISEKFHFRAALRPPVSSACIRAAVLLLPQLDFLFFSRI

SEQ ID NO: 4402 - protein, 86 aa, synthetic construct
  REGION 1..86: note = ATaRI peptide
QDKLTANEVCLAPQLAAFLGLDQHCLGVSLQRRPFQHPHPFPSHPAFSVTYPSPQPQVTCFRSAYKPLNPRSAPPNLPVHCLLFCR

SEQ ID NO: 4403 - protein, 32 aa, synthetic construct
  REGION 1..32: note = ATaRI peptide
SGTTVTSVGKYSSNKKAADKWDFIFELLFWVA

SEQ ID NO: 4404 - protein, 22 aa, synthetic construct
  REGION 1..22: note = ATaRI peptide
EILCAALWGRCLATTPTLSFLF

SEQ ID NO: 4405 - protein, 37 aa, synthetic construct
  REGION 1..37: note = ATaRI peptide
YHKFMAFKVTTSSEFKSSIGHSSCNQESGNMFKKSEC

SEQ ID NO: 4406 - protein, 51 aa, synthetic construct
  REGION 1..51: note = ATaRI peptide
WGEMPTSVGMENLGKGSICENGAVSETPFIYHADFVCPSDLLTTIEQSSWQ

SEQ ID NO: 4407 - protein, 17 aa, synthetic construct
  REGION 1..17: note = ATaRI peptide
TLRTTVKEGMYVFWGAL

SEQ ID NO: 4408 - protein, 12 aa, synthetic construct
  REGION 1..12: note = ATaRI peptide
LPKLQWYKVILF

SEQ ID NO: 4409 - protein, 93 aa, synthetic construct
  REGION 1..93: note = ATaRI peptide
ALPLSVTAGTFRVSSVPRGCPSPQAPGLSLGAPGDRVSPSAAPSPPQTARRSSAEEETENQLHVLGCSALNVAFELGGDFGEGKELGKFQVKT

SEQ ID NO: 4410 - protein, 9 aa, synthetic construct
  REGION 1..9: note = ATaRI peptide
SGVYQCVIK

SEQ ID NO: 4411 - protein, 22 aa, synthetic construct
  REGION 1..22: note = ATaRI peptide
LGPIKWYKVKKNFLIDIFPPFL

SEQ ID NO: 4412 - protein, 46 aa, synthetic construct
  REGION 1..46: note = ATaRI peptide
LNGITVSISKYAHVCLSPCILLALCELASGFGFWALSRSDSRSWFP

SEQ ID NO: 4413 - protein, 10 aa, synthetic construct
  REGION 1..10: note = ATaRI peptide
NHSIEVQLGE

SEQ ID NO: 4414 - protein, 29 aa, synthetic construct
  REGION 1..29: note = ATaRI peptide
AYIILQLPGNTPVGYTLFRVFKTMARKHI

SEQ ID NO: 4415 - protein, 12 aa, synthetic construct
  REGION 1..12: note = ATaRI peptide
FHSTETIVGKCV

SEQ ID NO: 4416 - protein, 44 aa, synthetic construct
  REGION 1..44: note = ATaRI peptide
HTPCYRTAGERVGGHEVCHALMEGLSLRGGSQLEEDTFHRGRLL

SEQ ID NO: 4417 - protein, 9 aa, synthetic construct
  REGION 1..9: note = ATaRI peptide
RARAIVTTV

SEQ ID NO: 4418 - protein, 48 aa, synthetic construct
  REGION 1..48: note = ATaRI peptide
HEIKNETKRYFLVVLAFNLSYITKVIYKLLIFPEINLSKKFIYSMTIY

SEQ ID NO: 4419 - protein, 24 aa, synthetic construct
  REGION 1..24: note = ATaRI peptide
PKEEAEAMVSMGVVSMLVSGLNET

SEQ ID NO: 4420 - protein, 25 aa, synthetic construct
  REGION 1..25: note = ATaRI peptide
QKAKSRCTGIGLKILILITVSLIVV

SEQ ID NO: 4421 - protein, 12 aa, synthetic construct
  REGION 1..12: note = ATaRI peptide
RAELILLKVPFI

SEQ ID NO: 4422 - protein, 13 aa, synthetic construct
  REGION 1..13: note = ATaRI peptide
LQKEQKIKVKTIL

SEQ ID NO: 4423 - protein, 10 aa, synthetic construct
  REGION 1..10: note = ATaRI peptide
QELELVKKVK

SEQ ID NO: 4424 - protein, 42 aa, synthetic construct
  REGION 1..42: note = ATaRI peptide
QEECRAAKVRSSGQPQQATGILLSASHWFTPGLCSAFLVFSC

SEQ ID NO: 4425 - protein, 9 aa, synthetic construct
  REGION 1..9: note = ATaRI peptide
IGFVKNAGR

SEQ ID NO: 4426 - protein, 23 aa, synthetic construct
  REGION 1..23: note = ATaRI peptide
MGKQWHVEVSSKWQRVTNPFKSP

SEQ ID NO: 4427 - protein, 9 aa, synthetic construct
  REGION 1..9: note = ATaRI peptide
QKKKKPVCL

SEQ ID NO: 4428 - protein, 14 aa, synthetic construct
  REGION 1..14: note = ATaRI peptide
TFHGAPLTGELASG

SEQ ID NO: 4429 - protein, 11 aa, synthetic construct
  REGION 1..11: note = ATaRI peptide
IDTDSTSQGKS

SEQ ID NO: 4430 - protein, 16 aa, synthetic construct
  REGION 1..16: note = ATaRI peptide
GDFAFGSKGKIKRRDF

SEQ ID NO: 4431 - protein, 9 aa, synthetic construct
  REGION 1..9: note = ATaRI peptide
LFKHVNVNW

SEQ ID NO: 4432 - protein, 13 aa, synthetic construct
  REGION 1..13: note = ATaRI peptide
FQIHLKLQVRTKY

SEQ ID NO: 4433 - protein, 11 aa, synthetic construct
  REGION 1..11: note = ATaRI peptide
TRFQIIKEVTI

SEQ ID NO: 4434 - protein, 10 aa, synthetic construct
  REGION 1..10: note = ATaRI peptide
GKLAAVAQGG

SEQ ID NO: 4435 - protein, 29 aa, synthetic construct
  REGION 1..29: note = ATaRI peptide
HNEHSNLEVSKTQVFNVYKAMKENYGYKD

SEQ ID NO: 4436 - protein, 9 aa, synthetic construct
  REGION 1..9: note = ATaRI peptide
VSLGYGIVK

SEQ ID NO: 4437 - protein, 12 aa, synthetic construct
  REGION 1..12: note = ATaRI peptide
WRPSANNQRYLT

SEQ ID NO: 4438 - protein, 14 aa, synthetic construct
  REGION 1..14: note = ATaRI peptide
KPATSENFVSMVYI

SEQ ID NO: 4439 - protein, 19 aa, synthetic construct
  REGION 1..19: note = ATaRI peptide
QRMKGVQQGKFEITVCLRM

SEQ ID NO: 4440 - protein, 9 aa, synthetic construct
  REGION 1..9: note = ATaRI peptide
DLAHKIGRK

SEQ ID NO: 4441 - protein, 23 aa, synthetic construct
  REGION 1..23: note = ATaRI peptide
HRAPSKEEGVSEVINSILPIWMG

SEQ ID NO: 4442 - protein, 9 aa, synthetic construct
  REGION 1..9: note = ATaRI peptide
PGHRKFDIR

SEQ ID NO: 4443 - protein, 24 aa, synthetic construct
  REGION 1..24: note = ATaRI peptide
TGNLRSKTGKIKSIVLVMFFKLVA

SEQ ID NO: 4444 - protein, 28 aa, synthetic construct
  REGION 1..28: note = ATaRI peptide
ADSLRHFKVGLRLCELSYPLTLGFSVPF

SEQ ID NO: 4445 - protein, 13 aa, synthetic construct
  REGION 1..13: note = ATaRI peptide
RNMYQCQMGKEEG

SEQ ID NO: 4446 - protein, 34 aa, synthetic construct
  REGION 1..34: note = ATaRI peptide
FAHGGNDVRSVDIDLSVANPIFKPFILVTGLCLW

SEQ ID NO: 4447 - protein, 39 aa, synthetic construct
  REGION 1..39: note = ATaRI peptide
PPGHGESEVSPVLGTNRGCAGNTEGRVFLGGHQAQNILF

SEQ ID NO: 4448 - protein, 92 aa, synthetic construct
  REGION 1..92: note = ATaRI peptide
RKEYLEYEVSGRAHLPAAAQRPLRPLVAASVPAAVTALTAPGRGEALACGRGPRAPSAKGRGLPHGHPRARACTKSVCPHALRPVASRPGGT

SEQ ID NO: 4449 - protein, 27 aa, synthetic construct
  REGION 1..27: note = ATaRI peptide
GTQPHLDQVKKKNLNPKFLINVFKGPL

SEQ ID NO: 4450 - protein, 13 aa, synthetic construct
  REGION 1..13: note = ATaRI peptide
ETAQWANPSMLGD

SEQ ID NO: 4451 - protein, 27 aa, synthetic construct
  REGION 1..27: note = ATaRI peptide
GGSMLASTVSVMKLTFILFYHYYFIYF

SEQ ID NO: 4452 - protein, 9 aa, synthetic construct
  REGION 1..9: note = ATaRI peptide
AMELLESSR

SEQ ID NO: 4453 - protein, 21 aa, synthetic construct
  REGION 1..21: note = ATaRI peptide
GELPQAAKVRVSSILPRTEDF

SEQ ID NO: 4454 - protein, 18 aa, synthetic construct
  REGION 1..18: note = ATaRI peptide
KVPPFVDLSILFFNEVIL

SEQ ID NO: 4455 - protein, 31 aa, synthetic construct
  REGION 1..31: note = ATaRI peptide
LRLTSEQLVSLPCLARLCCEHMRFLQTPKAV

SEQ ID NO: 4456 - protein, 10 aa, synthetic construct
  REGION 1..10: note = ATaRI peptide
NIGRQLAMVS

SEQ ID NO: 4457 - protein, 12 aa, synthetic construct
  REGION 1..12: note = ATaRI peptide
EKQHQQILVGTF

SEQ ID NO: 4458 - protein, 38 aa, synthetic construct
  REGION 1..38: note = ATaRI peptide
DCIRVHCKVGLLKLLFFFFFFDGGLKLTFSMVAEREVE

SEQ ID NO: 4459 - protein, 32 aa, synthetic construct
  REGION 1..32: note = ATaRI peptide
IFLVANKQVSKMVFATSHQVLQYSNDFLKDIT

SEQ ID NO: 4460 - protein, 9 aa, synthetic construct
  REGION 1..9: note = ATaRI peptide
EEMENHLKW

SEQ ID NO: 4461 - protein, 60 aa, synthetic construct
  REGION 1..60: note = ATaRI peptide
QKACAKYKVRVTANLLSFVSLDVFKFLLYARCQVEENPQLSWEWERLTTSKLSTINQDWL

SEQ ID NO: 4462 - protein, 17 aa, synthetic construct
  REGION 1..17: note = ATaRI peptide
RVVRNQEEVGNFPLFRI

SEQ ID NO: 4463 - protein, 17 aa, synthetic construct
  REGION 1..17: note = ATaRI peptide
RFQQVARKVSLSTSWKC

SEQ ID NO: 4464 - protein, 9 aa, synthetic construct
  REGION 1..9: note = ATaRI peptide
LPVIKPPGR

SEQ ID NO: 4465 - protein, 9 aa, synthetic construct
  REGION 1..9: note = ATaRI peptide
RSPPGTPNQ

SEQ ID NO: 4466 - protein, 22 aa, synthetic construct
  REGION 1..22: note = ATaRI peptide
PSSPEKPTVSSFFRYSHFYLNF

SEQ ID NO: 4467 - protein, 13 aa, synthetic construct
  REGION 1..13: note = ATaRI peptide
LMLLVRPNGEYSM

SEQ ID NO: 4468 - protein, 15 aa, synthetic construct
  REGION 1..15: note = ATaRI peptide
GTVLTQFDVSNIIIY

SEQ ID NO: 4469 - protein, 23 aa, synthetic construct
  REGION 1..23: note = ATaRI peptide
KMTLFNQEVRRQDICSLELLCSG

SEQ ID NO: 4470 - protein, 16 aa, synthetic construct
  REGION 1..16: note = ATaRI peptide
EEPVVVHCRYSVFRLL

SEQ ID NO: 4471 - protein, 11 aa, synthetic construct
  REGION 1..11: note = ATaRI peptide
SFTATAEFRYV

SEQ ID NO: 4472 - protein, 21 aa, synthetic construct
  REGION 1..21: note = ATaRI peptide
KFPAEQYYRFVRKIALFYNVK

SEQ ID NO: 4473 - protein, 92 aa, synthetic construct
  REGION 1..92: note = ATaRI peptide
NIGSSDHDGKIEANASLTLVSGKILGKNCLFIVCVAWQLMENIVVFNDWSYDGGQEEPTQHKLLFLKQCIPLAISGTFVFFPSCFCSIVILY

SEQ ID NO: 4474 - protein, 23 aa, synthetic construct
  REGION 1..23: note = ATaRI peptide
ATIQAFQQVGPVLLKNSILECIS

SEQ ID NO: 4475 - protein, 23 aa, synthetic construct
  REGION 1..23: note = ATaRI peptide
QGFLFGKLRYVCSVYFGKRPHFL

SEQ ID NO: 4476 - protein, 9 aa, synthetic construct
  REGION 1..9: note = ATaRI peptide
SQNFPTKAR

SEQ ID NO: 4477 - protein, 60 aa, synthetic construct
  REGION 1..60: note = ATaRI peptide
DYLDLTASSKEHFRNNLMLFLTCASESLHFSDFNILIIFCSVQKIAQDCDKILCVNSLHL

SEQ ID NO: 4478 - protein, 30 aa, synthetic construct
  REGION 1..30: note = ATaRI peptide
SMNYLTKKGNPFEAYYLAFNIFLKVFAYSS

SEQ ID NO: 4479 - protein, 26 aa, synthetic construct
  REGION 1..26: note = ATaRI peptide
GMSSKEIYGNLKLQNVLFLNFLLWFQ

SEQ ID NO: 4480 - protein, 22 aa, synthetic construct
  REGION 1..22: note = ATaRI peptide
LYDAIKHQASIYDFILYFCLWL

SEQ ID NO: 4481 - protein, 9 aa, synthetic construct
  REGION 1..9: note = ATaRI peptide
QQLRVEEDV

SEQ ID NO: 4482 - protein, 22 aa, synthetic construct
  REGION 1..22: note = ATaRI peptide
YQFFEDRHRYRINVEFVHILEY

SEQ ID NO: 4483 - protein, 18 aa, synthetic construct
  REGION 1..18: note = ATaRI peptide
LDNIYLEEVRPYLLLPNT

SEQ ID NO: 4484 - protein, 9 aa, synthetic construct
  REGION 1..9: note = ATaRI peptide
SEDIYRIYR

SEQ ID NO: 4485 - protein, 11 aa, synthetic construct
  REGION 1..11: note = ATaRI peptide
FLFVDADQVGP

SEQ ID NO: 4486 - protein, 10 aa, synthetic construct
  REGION 1..10: note = ATaRI peptide
LAGRKYHIRY

SEQ ID NO: 4487 - protein, 57 aa, synthetic construct
  REGION 1..57: note = ATaRI peptide
NSLSNLDQVSVHFLWLTVSDGYTVLHQKMKYYLCLQSSPHRMASCFFMVCVCVCVCV

SEQ ID NO: 4488 - protein, 11 aa, synthetic construct
  REGION 1..11: note = ATaRI peptide
LQDSRTNTVSC

SEQ ID NO: 4489 - protein, 11 aa, synthetic construct
  REGION 1..11: note = ATaRI peptide
RRQTIIFLSES

SEQ ID NO: 4490 - protein, 21 aa, synthetic construct
  REGION 1..21: note = ATaRI peptide
EEADHNSLVSDFGKLFLDLCI

SEQ ID NO: 4491 - protein, 17 aa, synthetic construct
  REGION 1..17: note = ATaRI peptide
LEKRKRKKVSFLLIQCS

SEQ ID NO: 4492 - protein, 9 aa, synthetic construct
  REGION 1..9: note = ATaRI peptide
LGPSWVHYQ

SEQ ID NO: 4493 - protein, 9 aa, synthetic construct
  REGION 1..9: note = ATaRI peptide
LNKDKDMLK

SEQ ID NO: 4494 - protein, 19 aa, synthetic construct
  REGION 1..19: note = ATaRI peptide
PLLDTKCDVCKYWVFYFSL

SEQ ID NO: 4495 - protein, 19 aa, synthetic construct
  REGION 1..19: note = ATaRI peptide
EGKDELLEGKLFLYNNINF

SEQ ID NO: 4496 - protein, 9 aa, synthetic construct
  REGION 1..9: note = ATaRI peptide
SIALGNTGW

SEQ ID NO: 4497 - protein, 9 aa, synthetic construct
  REGION 1..9: note = ATaRI peptide
FGACEDPIR

SEQ ID NO: 4498 - protein, 43 aa, synthetic construct
  REGION 1..43: note = ATaRI peptide
DVLNTILLVTKCSVFIGLYAESFIHYIASSFYVVGSDLGIYNE

SEQ ID NO: 4499 - protein, 18 aa, synthetic construct
  REGION 1..18: note = ATaRI peptide
RDRIFSQDVRTNLLRSSC

SEQ ID NO: 4500 - protein, 36 aa, synthetic construct
  REGION 1..36: note = ATaRI peptide
SIGRLSKTGINIYTKLCSQVISFPNVVSGPYLSDGF

SEQ ID NO: 4501 - protein, 57 aa, synthetic construct
  REGION 1..57: note = ATaRI peptide
TRIHKVRQVRRNRTVVSVNGTSGIGFFFLRWSLVLSPRLECSGVISAQVQPPPPRFK

SEQ ID NO: 4502 - protein, 22 aa, synthetic construct
  REGION 1..22: note = ATaRI peptide
EKRKEEEQVKFMQLALFCPLIN

SEQ ID NO: 4503 - protein, 41 aa, synthetic construct
  REGION 1..41: note = ATaRI peptide
EAARHNRKVTKGTLLSKGQASDWLCVSDRWVSLSLAGWAQG

SEQ ID NO: 4504 - protein, 10 aa, synthetic construct
  REGION 1..10: note = ATaRI peptide
KREETKAMGK

SEQ ID NO: 4505 - protein, 21 aa, synthetic construct
  REGION 1..21: note = ATaRI peptide
DKLTLFCEVGTSFILRTPWFI

SEQ ID NO: 4506 - protein, 12 aa, synthetic construct
  REGION 1..12: note = ATaRI peptide
HEMEESKKVNMA

SEQ ID NO: 4507 - protein, 9 aa, synthetic construct
  REGION 1..9: note = ATaRI peptide
GHKPAISHR

SEQ ID NO: 4508 - protein, 19 aa, synthetic construct
  REGION 1..19: note = ATaRI peptide
SAGDTHGQVRMMIIKCKKK

SEQ ID NO: 4509 - protein, 33 aa, synthetic construct
  REGION 1..33: note = ATaRI peptide
SKWSALCQVSSYYYLWYLQSCTPKTKERTKHGD

SEQ ID NO: 4510 - protein, 36 aa, synthetic construct
  REGION 1..36: note = ATaRI peptide
PKQFIHIQRKFVNSLFSVCTLNLSTSGNLFFCLKKF

SEQ ID NO: 4511 - protein, 27 aa, synthetic construct
  REGION 1..27: note = ATaRI peptide
KVQECKTKVNIVWEEACMDGNVDQRSY

SEQ ID NO: 4512 - protein, 35 aa, synthetic construct
  REGION 1..35: note = ATaRI peptide
RAGCQYYAVRTFVCVWCFCELELTGNPCQDDLVLI

SEQ ID NO: 4513 - protein, 25 aa, synthetic construct
  REGION 1..25: note = ATaRI peptide
INGVVQPSGTAGVSHGTYFLEVVTQ

SEQ ID NO: 4514 - protein, 10 aa, synthetic construct
  REGION 1..10: note = ATaRI peptide
PKITSELSGR

SEQ ID NO: 4515 - protein, 17 aa, synthetic construct
  REGION 1..17: note = ATaRI peptide
FEALNVIVRYAFGCCAN

SEQ ID NO: 4516 - protein, 11 aa, synthetic construct
  REGION 1..11: note = ATaRI peptide
NPMTPVHKGKR

SEQ ID NO: 4517 - protein, 50 aa, synthetic construct
  REGION 1..50: note = ATaRI peptide
LVKSVTESGKHYYTDQMLFFETGGDQMIFIASGELFDYIKFILKVFLALP

SEQ ID NO: 4518 - protein, 22 aa, synthetic construct
  REGION 1..22: note = ATaRI peptide
VFPVSKTLVSIIPVCWTLKTIF

SEQ ID NO: 4519 - protein, 15 aa, synthetic construct
  REGION 1..15: note = ATaRI peptide
VANMDILNASILNVI

SEQ ID NO: 4520 - protein, 9 aa, synthetic construct
  REGION 1..9: note = ATaRI peptide
PLTELINQV

SEQ ID NO: 4521 - protein, 23 aa, synthetic construct
  REGION 1..23: note = ATaRI peptide
FSEQRFPVVRHCQVLISEGFVFF

SEQ ID NO: 4522 - protein, 22 aa, synthetic construct
  REGION 1..22: note = ATaRI peptide
IKYQPKVKCKYVFFNLCLSSIS

SEQ ID NO: 4523 - protein, 9 aa, synthetic construct
  REGION 1..9: note = ATaRI peptide
LALFYENSK

SEQ ID NO: 4524 - protein, 15 aa, synthetic construct
  REGION 1..15: note = ATaRI peptide
VYSCLNNKVKIDNSP

SEQ ID NO: 4525 - protein, 30 aa, synthetic construct
  REGION 1..30: note = ATaRI peptide
SSGPYSDGVSWGVLLFICFWTFKLFVESYK

SEQ ID NO: 4526 - protein, 18 aa, synthetic construct
  REGION 1..18: note = ATaRI peptide
ENMKPAAKVCFQKFNQKF

SEQ ID NO: 4527 - protein, 15 aa, synthetic construct
  REGION 1..15: note = ATaRI peptide
QKEVLKTKRFVGLLS

SEQ ID NO: 4528 - protein, 28 aa, synthetic construct
  REGION 1..28: note = ATaRI peptide
EDSKMMITVCLTFHILGFLESPFHYTVC

SEQ ID NO: 4529 - protein, 9 aa, synthetic construct
  REGION 1..9: note = ATaRI peptide
LPQITSNMW

SEQ ID NO: 4530 - protein, 11 aa, synthetic construct
  REGION 1..11: note = ATaRI peptide
PDEERLVSGIF

SEQ ID NO: 4531 - protein, 9 aa, synthetic construct
  REGION 1..9: note = ATaRI peptide
LSFAQYAVT

SEQ ID NO: 4532 - protein, 9 aa, synthetic construct
  REGION 1..9: note = ATaRI peptide
LSLNNKNPR

SEQ ID NO: 4533 - protein, 33 aa, synthetic construct
  REGION 1..33: note = ATaRI peptide
LGLDEYLDVSIAVTFGSNIRIDLLLPALKGTLP

SEQ ID NO: 4534 - protein, 53 aa, synthetic construct
  REGION 1..53: note = ATaRI peptide
NKELDVVRVSVMMTTAQMGTVGNVLQLSSSGTQSTFISEECIDAAYLLETFER

SEQ ID NO: 4535 - protein, 16 aa, synthetic construct
  REGION 1..16: note = ATaRI peptide
IDDERILEVFFSLVRN

SEQ ID NO: 4536 - protein, 65 aa, synthetic construct
  REGION 1..65: note = ATaRI peptide
ESIQMLTPVSGLTLAGEGVQRNVESLFFKVSPRIVLSVMGSKDSFPELSKLHFYFNHLFHIMYAK

SEQ ID NO: 4537 - protein, 20 aa, synthetic construct
  REGION 1..20: note = ATaRI peptide
AIAYLIVKGIEADALKVCPE

SEQ ID NO: 4538 - protein, 105 aa, synthetic construct
  REGION 1..105: note = ATaRI peptide
RGEDGGLLRCVCGNSGGGGAACCTPQPWGRPRRAKGAGADRGQGDRRALSAAVPDGPALRDQGRPRLGFGGRFFPGAGRNVPPPALSLLPVSTWLSCQCTFGCKI

SEQ ID NO: 4539 - protein, 19 aa, synthetic construct
  REGION 1..19: note = ATaRI peptide
PYDRGSAFGKWIDFPSAHL

SEQ ID NO: 4540 - protein, 12 aa, synthetic construct
  REGION 1..12: note = ATaRI peptide
TMQASLDLGKCF

SEQ ID NO: 4541 - protein, 30 aa, synthetic construct
  REGION 1..30: note = ATaRI peptide
YIVKSQHSGIIPARVRISRIVRIIDENSSK

SEQ ID NO: 4542 - protein, 11 aa, synthetic construct
  REGION 1..11: note = ATaRI peptide
YGQKRAAGGKL

SEQ ID NO: 4543 - protein, 19 aa, synthetic construct
  REGION 1..19: note = ATaRI peptide
ARCKDVLTGMPGIWEGGIS

SEQ ID NO: 4544 - protein, 20 aa, synthetic construct
  REGION 1..20: note = ATaRI peptide
QDYGLESEVSVHCHIILLFT

SEQ ID NO: 4545 - protein, 37 aa, synthetic construct
  REGION 1..37: note = ATaRI peptide
EFPYIEAEVCEWSHRNFMSAMGYHLSVHLSSLKIICS

SEQ ID NO: 4546 - protein, 14 aa, synthetic construct
  REGION 1..14: note = ATaRI peptide
NWDDYKKQVLYRSL

SEQ ID NO: 4547 - protein, 77 aa, synthetic construct
  REGION 1..77: note = ATaRI peptide
VELNEFLQVSCGERKQGYLLLSFVCHDHKCMFKNGYLSPHNCQIILKKKKARSQQRLICLPSSVRLYCGAYSFPFFV

SEQ ID NO: 4548 - protein, 56 aa, synthetic construct
  REGION 1..56: note = ATaRI peptide
ESPSIASTRYRANGSIFMHTQVTCLTRLFSMQQKILLVLLLLTCLPEFETKNVHLF

SEQ ID NO: 4549 - protein, 55 aa, synthetic construct
  REGION 1..55: note = ATaRI peptide
GKGGKKEAGMCARMRSSAMDSGQQAAPHPRPDGFVALGVGQRGLPGLEQTVCWRL

SEQ ID NO: 4550 - protein, 21 aa, synthetic construct
  REGION 1..21: note = ATaRI peptide
SRVNKKSPGKQAMKELPWLYM

SEQ ID NO: 4551 - protein, 52 aa, synthetic construct
  REGION 1..52: note = ATaRI peptide
MPRPNSVAGKATPFPGRIISGIPRCPVFTVFTWEDTPDTSQLRGRGSGTYLF

SEQ ID NO: 4552 - protein, 21 aa, synthetic construct
  REGION 1..21: note = ATaRI peptide
GGRAQEVKGIYPGISCDNGYD

SEQ ID NO: 4553 - protein, 21 aa, synthetic construct
  REGION 1..21: note = ATaRI peptide
NSPGSSPKSTCMFNYLSSLLT

SEQ ID NO: 4554 - protein, 19 aa, synthetic construct
  REGION 1..19: note = ATaRI peptide
AVKYLASKVIFLVLLEPST

SEQ ID NO: 4555 - protein, 20 aa, synthetic construct
  REGION 1..20: note = ATaRI peptide
EPLTNLRNGTSQQLPTAPSQ

SEQ ID NO: 4556 - protein, 25 aa, synthetic construct
  REGION 1..25: note = ATaRI peptide
VTVRANFQVTKNSQIFLQVPIPILQ

SEQ ID NO: 4557 - protein, 75 aa, synthetic construct
  REGION 1..75: note = ATaRI peptide
NTAFLCEPRYGRRFLSALCRESRVQLGKGFKCDARVSMEGQSRMTNSVLLLCFIIFLPFWQKDGQWGILYTEAAF

SEQ ID NO: 4558 - protein, 40 aa, synthetic construct
  REGION 1..40: note = ATaRI peptide
NLYTPNVKVSNLLHREPETQPWPAAGRSSNSPVSLCPGWW

SEQ ID NO: 4559 - protein, 27 aa, synthetic construct
  REGION 1..27: note = ATaRI peptide
LLTKKGVRVSGSLLFWGWGREMASSHC

SEQ ID NO: 4560 - protein, 22 aa, synthetic construct
  REGION 1..22: note = ATaRI peptide
AASMGHSSVSGAGVSLLGNKKL

SEQ ID NO: 4561 - protein, 22 aa, synthetic construct
  REGION 1..22: note = ATaRI peptide
TDTLWGETGNYNATACSLGQLA

SEQ ID NO: 4562 - protein, 69 aa, synthetic construct
  REGION 1..69: note = ATaRI peptide
AARQGHWQVPRGPLNASEAMSGDGVHYCLAPLRTQCSSPEPVCSPSSASAVPSGLLDRATFDKITQLAT

SEQ ID NO: 4563 - protein, 27 aa, synthetic construct
  REGION 1..27: note = ATaRI peptide
AFYGDAETVSTSRCSPPPPALERNPRK

SEQ ID NO: 4564 - protein, 14 aa, synthetic construct
  REGION 1..14: note = ATaRI peptide
SLADDLKIGKLSER

SEQ ID NO: 4565 - protein, 9 aa, synthetic construct
  REGION 1..9: note = ATaRI peptide
HDGQMLVSG

SEQ ID NO: 4566 - protein, 16 aa, synthetic construct
  REGION 1..16: note = ATaRI peptide
SGDFTTSSCMYKLHQV

SEQ ID NO: 4567 - protein, 29 aa, synthetic construct
  REGION 1..29: note = ATaRI peptide
LLLVNSTQGMFMLIFYVFLEPLGEKKGVS

SEQ ID NO: 4568 - protein, 18 aa, synthetic construct
  REGION 1..18: note = ATaRI peptide
FAMPQSGTVSTFMVACCK

SEQ ID NO: 4569 - protein, 9 aa, synthetic construct
  REGION 1..9: note = ATaRI peptide
LDMLKQTGR

SEQ ID NO: 4570 - protein, 15 aa, synthetic construct
  REGION 1..15: note = ATaRI peptide
DSADALLEVKVFFHL

SEQ ID NO: 4571 - protein, 51 aa, synthetic construct
  REGION 1..51: note = ATaRI peptide
AGKWNPLHVSFSSSLSIPVLSASCLLEGHSDAFVSTHIVLSNLLALSRGFM

SEQ ID NO: 4572 - protein, 61 aa, synthetic construct
  REGION 1..61: note = ATaRI peptide
ENFRCLCTGLFTFSTALIVVSVDYGLLACLVFFFFFFFFLRQDLATLSNWTRTPGLINPYT

SEQ ID NO: 4573 - protein, 18 aa, synthetic construct
  REGION 1..18: note = ATaRI peptide
SIYGGFFEGKNVYIYIMF

SEQ ID NO: 4574 - protein, 36 aa, synthetic construct
  REGION 1..36: note = ATaRI peptide
REREREREWYVNMYILPYMVYHRTFLFKKLFILNKI

SEQ ID NO: 4575 - protein, 9 aa, synthetic construct
  REGION 1..9: note = ATaRI peptide
AKICHQIEV

SEQ ID NO: 4576 - protein, 11 aa, synthetic construct
  REGION 1..11: note = ATaRI peptide
LREGYNEPGMF

SEQ ID NO: 4577 - protein, 37 aa, synthetic construct
  REGION 1..37: note = ATaRI peptide
MLPDQEYKVSIYFPAFLNLAFLSLPFIIKSFFDIFLR

SEQ ID NO: 4578 - protein, 18 aa, synthetic construct
  REGION 1..18: note = ATaRI peptide
DPDIYLLQVSQLDNADIL

SEQ ID NO: 4579 - protein, 15 aa, synthetic construct
  REGION 1..15: note = ATaRI peptide
GAFPVSISVRHKYPG

SEQ ID NO: 4580 - protein, 18 aa, synthetic construct
  REGION 1..18: note = ATaRI peptide
PLKDGFTEVRSRSYLSIS

SEQ ID NO: 4581 - protein, 36 aa, synthetic construct
  REGION 1..36: note = ATaRI peptide
VRVLLEEQGSQLRAVAPRARALVTFPPPRVIASESS

SEQ ID NO: 4582 - protein, 23 aa, synthetic construct
  REGION 1..23: note = ATaRI peptide
ALLWECPVVRFVFRAFVSKAFLA

SEQ ID NO: 4583 - protein, 13 aa, synthetic construct
  REGION 1..13: note = ATaRI peptide
IPCNIKITGMATL

SEQ ID NO: 4584 - protein, 45 aa, synthetic construct
  REGION 1..45: note = ATaRI peptide
VPSASGYKVIHLCTHVITYQMVFFFILISKYTTVKSLLALKAKQY

SEQ ID NO: 4585 - protein, 27 aa, synthetic construct
  REGION 1..27: note = ATaRI peptide
LANRENHKVSQEYFKILYISLSFYIRL

SEQ ID NO: 4586 - protein, 16 aa, synthetic construct
  REGION 1..16: note = ATaRI peptide
EEERKKKEVCLIFLLK

SEQ ID NO: 4587 - protein, 10 aa, synthetic construct
  REGION 1..10: note = ATaRI peptide
QLHSDSDLGY

SEQ ID NO: 4588 - protein, 11 aa, synthetic construct
  REGION 1..11: note = ATaRI peptide
PLSAAAHTVSK

SEQ ID NO: 4589 - protein, 9 aa, synthetic construct
  REGION 1..9: note = ATaRI peptide
VYTACRHGR

SEQ ID NO: 4590 - protein, 32 aa, synthetic construct
  REGION 1..32: note = ATaRI peptide
VLCHGIPDRYSVLNNILFLWKLKHEAKICNIC

SEQ ID NO: 4591 - protein, 28 aa, synthetic construct
  REGION 1..28: note = ATaRI peptide
APGTYNWKGMTFVFIEIEISSPNFCNMI

SEQ ID NO: 4592 - protein, 38 aa, synthetic construct
  REGION 1..38: note = ATaRI peptide
PVPANSYLGRSRHRWLPLPTFSDTLCETPSQGLWPLDF

SEQ ID NO: 4593 - protein, 10 aa, synthetic construct
  REGION 1..10: note = ATaRI peptide
DVMMNSYLGL

SEQ ID NO: 4594 - protein, 9 aa, synthetic construct
  REGION 1..9: note = ATaRI peptide
AEDAKAIYE

SEQ ID NO: 4595 - protein, 11 aa, synthetic construct
  REGION 1..11: note = ATaRI peptide
CNVLEVIKGKY

SEQ ID NO: 4596 - protein, 16 aa, synthetic construct
  REGION 1..16: note = ATaRI peptide
TDAVIYIKVIAVVFLI

SEQ ID NO: 4597 - protein, 13 aa, synthetic construct
  REGION 1..13: note = ATaRI peptide
METGSNNDSKWKM

SEQ ID NO: 4598 - protein, 9 aa, synthetic construct
  REGION 1..9: note = ATaRI peptide
HMRMILRKP

SEQ ID NO: 4599 - protein, 14 aa, synthetic construct
  REGION 1..14: note = ATaRI peptide
ALSHLSTTVSCLLV

SEQ ID NO: 4600 - protein, 10 aa, synthetic construct
  REGION 1..10: note = ATaRI peptide
SHAKGGTVCK

SEQ ID NO: 4601 - protein, 25 aa, synthetic construct
  REGION 1..25: note = ATaRI peptide
EDFNRILRVSPKQSVAERQPIFFFN

SEQ ID NO: 4602 - protein, 52 aa, synthetic construct
  REGION 1..52: note = ATaRI peptide
QGNSQPQQKYVCIQHCNCQTMINLFTWYHHFYNSMFSFFVEDGSVCDFFPLY

SEQ ID NO: 4603 - protein, 57 aa, synthetic construct
  REGION 1..57: note = ATaRI peptide
EATLNEATGIHIEPFACPLNPCIALFKSPEFICSVYSESSLGRGFCVLIFEKHLCVT

SEQ ID NO: 4604 - protein, 80 aa, synthetic construct
  REGION 1..80: note = ATaRI peptide
QLCPALVAQYPFIVIVSPYSLEDNPPYRGPFLSHLLQVSHGPGRVVHSTLITLKCVFPHFPQFSPVQTLALPGRGLLCHV

SEQ ID NO: 4605 - protein, 38 aa, synthetic construct
  REGION 1..38: note = ATaRI peptide
DVSMAFLEVGRGHLFQEYTVVLQYRDLLIGSAASLERP

SEQ ID NO: 4606 - protein, 9 aa, synthetic construct
  REGION 1..9: note = ATaRI peptide
ELEKIVKQM

SEQ ID NO: 4607 - protein, 17 aa, synthetic construct
  REGION 1..17: note = ATaRI peptide
QPIRGSDEGENPLPTNS

SEQ ID NO: 4608 - protein, 30 aa, synthetic construct
  REGION 1..30: note = ATaRI peptide
IVKMSSGGGNSLNSYFRLCKMGHSIQAETM

SEQ ID NO: 4609 - protein, 33 aa, synthetic construct
  REGION 1..33: note = ATaRI peptide
PREQFDSLVGVDGLLRAALQSEKLVWSLILQSH

SEQ ID NO: 4610 - protein, 9 aa, synthetic construct
  REGION 1..9: note = ATaRI peptide
KKFIKIAAQ

SEQ ID NO: 4611 - protein, 12 aa, synthetic construct
  REGION 1..12: note = ATaRI peptide
SRLALTWEVSFS

SEQ ID NO: 4612 - protein, 27 aa, synthetic construct
  REGION 1..27: note = ATaRI peptide
YAEFESLMVSDSGFFILFTVYINPISD

SEQ ID NO: 4613 - protein, 24 aa, synthetic construct
  REGION 1..24: note = ATaRI peptide
DNLGERLKVGEINVLLAICLLKIS

SEQ ID NO: 4614 - protein, 9 aa, synthetic construct
  REGION 1..9: note = ATaRI peptide
FTGTPDPER

SEQ ID NO: 4615 - protein, 10 aa, synthetic construct
  REGION 1..10: note = ATaRI peptide
LEVVNNNEVC

SEQ ID NO: 4616 - protein, 35 aa, synthetic construct
  REGION 1..35: note = ATaRI peptide
NAEYMSPSGKCVFFSSLLILWSDKIIVIVQFVSTC

SEQ ID NO: 4617 - protein, 13 aa, synthetic construct
  REGION 1..13: note = ATaRI peptide
IVQFVKAKVIKRY

SEQ ID NO: 4618 - protein, 12 aa, synthetic construct
  REGION 1..12: note = ATaRI peptide
WGKKTLDQVSSG

SEQ ID NO: 4619 - protein, 28 aa, synthetic construct
  REGION 1..28: note = ATaRI peptide
VEHKTTSKVSKQKLLLTHLTVFLKPKLI

SEQ ID NO: 4620 - protein, 15 aa, synthetic construct
  REGION 1..15: note = ATaRI peptide
LKKFYITKVRIFIKC

SEQ ID NO: 4621 - protein, 29 aa, synthetic construct
  REGION 1..29: note = ATaRI peptide
TYVIAYIRVSYIIFPLPLNLCCKQYFFLL

SEQ ID NO: 4622 - protein, 15 aa, synthetic construct
  REGION 1..15: note = ATaRI peptide
LTVFEQTEVILHTCI

SEQ ID NO: 4623 - protein, 14 aa, synthetic construct
  REGION 1..14: note = ATaRI peptide
EDLREKFKVFILIS

SEQ ID NO: 4624 - protein, 45 aa, synthetic construct
  REGION 1..45: note = ATaRI peptide
QRDPYSNYGKIMFTLKNIYICIYTHTHTHTHTHTHTQSFVKMAFL

SEQ ID NO: 4625 - protein, 10 aa, synthetic construct
  REGION 1..10: note = ATaRI peptide
KMAVCEIKGK

SEQ ID NO: 4626 - protein, 42 aa, synthetic construct
  REGION 1..42: note = ATaRI peptide
DTRTKKEKGNYKLFPCGESTFLNININVTKLACPLLVSIPRK

SEQ ID NO: 4627 - protein, 73 aa, synthetic construct
  REGION 1..73: note = ATaRI peptide
NHSSPSAEVERRGSLHVWLCFGVLWGDPQSFHKMTGIFTLSYFQLFWVLPTVYYLEICSIFSIVSVWPEKNMK

SEQ ID NO: 4628 - protein, 9 aa, synthetic construct
  REGION 1..9: note = ATaRI peptide
HPGSCSSER

SEQ ID NO: 4629 - protein, 10 aa, synthetic construct
  REGION 1..10: note = ATaRI peptide
DIPLEDPDSK

SEQ ID NO: 4630 - protein, 16 aa, synthetic construct
  REGION 1..16: note = ATaRI peptide
DYPFKPPKVRSLKCIL

SEQ ID NO: 4631 - protein, 47 aa, synthetic construct
  REGION 1..47: note = ATaRI peptide
SLLTDCNPGKQIFINMYNKTTKTSAFFFFFFFFLVSFKCRLRGKCYS

SEQ ID NO: 4632 - protein, 15 aa, synthetic construct
  REGION 1..15: note = ATaRI peptide
EQSSSTLKGKRRLPF

SEQ ID NO: 4633 - protein, 9 aa, synthetic construct
  REGION 1..9: note = ATaRI peptide
GKSSGTVSR

SEQ ID NO: 4634 - protein, 14 aa, synthetic construct
  REGION 1..14: note = ATaRI peptide
ENPNYALTSKIFKC

SEQ ID NO: 4635 - protein, 9 aa, synthetic construct
  REGION 1..9: note = ATaRI peptide
YHHMTEEER

SEQ ID NO: 4636 - protein, 32 aa, synthetic construct
  REGION 1..32: note = ATaRI peptide
SPLNVMEPVSFFPLKSLGKGMIQHFRHIVSLV

SEQ ID NO: 4637 - protein, 16 aa, synthetic construct
  REGION 1..16: note = ATaRI peptide
WNYYRYDFGKVIRYYL

SEQ ID NO: 4638 - protein, 15 aa, synthetic construct
  REGION 1..15: note = ATaRI peptide
PEFELLARVSHTCLK

SEQ ID NO: 4639 - protein, 40 aa, synthetic construct
  REGION 1..40: note = ATaRI peptide
RNQGKRNKVWTKPRVDFGKSWQKLAKSIFPIHYMHPETTK

SEQ ID NO: 4640 - protein, 10 aa, synthetic construct
  REGION 1..10: note = ATaRI peptide
EMRSPLLAGR

SEQ ID NO: 4641 - protein, 9 aa, synthetic construct
  REGION 1..9: note = ATaRI peptide
DDSWVTVFG

SEQ ID NO: 4642 - protein, 12 aa, synthetic construct
  REGION 1..12: note = ATaRI peptide
GVKPCIDKVSYW

SEQ ID NO: 4643 - protein, 89 aa, synthetic construct
  REGION 1..89: note = ATaRI peptide
LDESSNHIRYVNRVPGTMLYVMFCFELFCLISYIDLTQCFSMRALYRFLGWYNSLSCGTVHFRMFACLIFKMNLYVSGEWVVFTEEYCR

SEQ ID NO: 4644 - protein, 16 aa, synthetic construct
  REGION 1..16: note = ATaRI peptide
VAAQKISKGKLKISEV

SEQ ID NO: 4645 - protein, 22 aa, synthetic construct
  REGION 1..22: note = ATaRI peptide
KKKPKTQIVCPFLELSCCDIYH

SEQ ID NO: 4646 - protein, 42 aa, synthetic construct
  REGION 1..42: note = ATaRI peptide
STYTSDKDGKYANFCLILRTRKLSKGGYTRLGKLRCVQVPDW

SEQ ID NO: 4647 - protein, 13 aa, synthetic construct
  REGION 1..13: note = ATaRI peptide
CSSEEEDLVRRRS

SEQ ID NO: 4648 - protein, 9 aa, synthetic construct
  REGION 1..9: note = ATaRI peptide
FFKKKTTSR

SEQ ID NO: 4649 - protein, 15 aa, synthetic construct
  REGION 1..15: note = ATaRI peptide
MDLAFSVTGKCGFNY

SEQ ID NO: 4650 - protein, 9 aa, synthetic construct
  REGION 1..9: note = ATaRI peptide
WMYNKKTQG

SEQ ID NO: 4651 - protein, 9 aa, synthetic construct
  REGION 1..9: note = ATaRI peptide
FCQRAGKIR

SEQ ID NO: 4652 - protein, 16 aa, synthetic construct
  REGION 1..16: note = ATaRI peptide
CWNLLSCACKIFFTLK

SEQ ID NO: 4653 - protein, 21 aa, synthetic construct
  REGION 1..21: note = ATaRI peptide
SQSSVGSDCKYKPHFVVREHL

SEQ ID NO: 4654 - protein, 22 aa, synthetic construct
  REGION 1..22: note = ATaRI peptide
ENIPAISEVSNYENHVKQIKCT

SEQ ID NO: 4655 - protein, 9 aa, synthetic construct
  REGION 1..9: note = ATaRI peptide
IGDHGKEAR

SEQ ID NO: 4656 - protein, 17 aa, synthetic construct
  REGION 1..17: note = ATaRI peptide
SSLLQPFSGKSITKNQI

SEQ ID NO: 4657 - protein, 9 aa, synthetic construct
  REGION 1..9: note = ATaRI peptide
LLEAEATAE

SEQ ID NO: 4658 - protein, 24 aa, synthetic construct
  REGION 1..24: note = ATaRI peptide
LPVWKTLVGEYNLFINTCSDYYSV

SEQ ID NO: 4659 - protein, 22 aa, synthetic construct
  REGION 1..22: note = ATaRI peptide
YWRCILDAGDANSINNFLCYFM

SEQ ID NO: 4660 - protein, 55 aa, synthetic construct
  REGION 1..55: note = ATaRI peptide
YLLHSTEKVIPLQNIEVHFEKNGFYTTSSNYQVFFMAIFNVLFKKRHVKDLFVGH

SEQ ID NO: 4661 - protein, 11 aa, synthetic construct
  REGION 1..11: note = ATaRI peptide
QTSTIVLTGKK

SEQ ID NO: 4662 - protein, 14 aa, synthetic construct
  REGION 1..14: note = ATaRI peptide
HLYSGIEEVKTSKN

SEQ ID NO: 4663 - protein, 41 aa, synthetic construct
  REGION 1..41: note = ATaRI peptide
TLVGLPSLRYGPMLEVAVVKSSIEETLMRFSKIQQEELFLI

SEQ ID NO: 4664 - protein, 35 aa, synthetic construct
  REGION 1..35: note = ATaRI peptide
VHQKDILKVVCFRKKKLFELEICHIVTRTASKNLL

SEQ ID NO: 4665 - protein, 29 aa, synthetic construct
  REGION 1..29: note = ATaRI peptide
RKVISYLEVRIILYICYCIQGSQLPGQAG

SEQ ID NO: 4666 - protein, 17 aa, synthetic construct
  REGION 1..17: note = ATaRI peptide
AKKQSGGKVMLLMYIFS

SEQ ID NO: 4667 - protein, 17 aa, synthetic construct
  REGION 1..17: note = ATaRI peptide
AANFRTVRVRCSTFIKL

SEQ ID NO: 4668 - protein, 9 aa, synthetic construct
  REGION 1..9: note = ATaRI peptide
WPHWKGPAR

SEQ ID NO: 4669 - protein, 31 aa, synthetic construct
  REGION 1..31: note = ATaRI peptide
IFIRNPRTVCNENLYTLNLSWNRIGKFLKYV

SEQ ID NO: 4670 - protein, 40 aa, synthetic construct
  REGION 1..40: note = ATaRI peptide
AAYWHGTQVGPRPQGRRWVSSNVMWNHEPSASGAENVSLA

SEQ ID NO: 4671 - protein, 10 aa, synthetic construct
  REGION 1..10: note = ATaRI peptide
YEFTLQRIVS

SEQ ID NO: 4672 - protein, 9 aa, synthetic construct
  REGION 1..9: note = ATaRI peptide
GDIIRLTRG

SEQ ID NO: 4673 - protein, 20 aa, synthetic construct
  REGION 1..20: note = ATaRI peptide
ALLHLLPHVRNVFNVFKNLK

SEQ ID NO: 4674 - protein, 19 aa, synthetic construct
  REGION 1..19: note = ATaRI peptide
FKHYKQQRVSIFYLFNFIP

SEQ ID NO: 4675 - protein, 13 aa, synthetic construct
  REGION 1..13: note = ATaRI peptide
WLQLKPLAGRQQF

SEQ ID NO: 4676 - protein, 99 aa, synthetic construct
  REGION 1..99: note = ATaRI peptide
EYSERRILGFVYDKNSTKRACSQFSVGYRVVPLSLWIIFLQTKLSFLGWPFSFFFFFLLRWSLTLECSGAILAHCNLRLSDSRDSPALASRVAGTCHHA

SEQ ID NO: 4677 - protein, 47 aa, synthetic construct
  REGION 1..47: note = ATaRI peptide
RTCTLDFSVSLIKPLICSTYEVKLVKSNHFLEHRGHNYIEYLFLHKC

SEQ ID NO: 4678 - protein, 13 aa, synthetic construct
  REGION 1..13: note = ATaRI peptide
CVDTALKTGGHVT

SEQ ID NO: 4679 - protein, 13 aa, synthetic construct
  REGION 1..13: note = ATaRI peptide
ISIYYDEKGNTRA

SEQ ID NO: 4680 - protein, 9 aa, synthetic construct
  REGION 1..9: note = ATaRI peptide
KQLLSASYE

SEQ ID NO: 4681 - protein, 29 aa, synthetic construct
  REGION 1..29: note = ATaRI peptide
HTRIHPVQVRMCLFLIGFLCFRNLMTLSP

SEQ ID NO: 4682 - protein, 18 aa, synthetic construct
  REGION 1..18: note = ATaRI peptide
SVVNHAYNGEFSSPCFLS

SEQ ID NO: 4683 - protein, 10 aa, synthetic construct
  REGION 1..10: note = ATaRI peptide
CTLNLLSKGK

SEQ ID NO: 4684 - protein, 9 aa, synthetic construct
  REGION 1..9: note = ATaRI peptide
NSCQKLIGR

SEQ ID NO: 4685 - protein, 15 aa, synthetic construct
  REGION 1..15: note = ATaRI peptide
HCSTLKYQVSGISCF

SEQ ID NO: 4686 - protein, 26 aa, synthetic construct
  REGION 1..26: note = ATaRI peptide
EPLILTIEVMSSVEWWCQLGARTNIS

SEQ ID NO: 4687 - protein, 11 aa, synthetic construct
  REGION 1..11: note = ATaRI peptide
KVVDQILEGKK

SEQ ID NO: 4688 - protein, 23 aa, synthetic construct
  REGION 1..23: note = ATaRI peptide
LGSRAAGQVSSPNAHEDAAWKQP

SEQ ID NO: 4689 - protein, 48 aa, synthetic construct
  REGION 1..48: note = ATaRI peptide
PKGTWKDWVRINGSLYFILEEKGVGGEQEQCALIEICRKGICKGTTIV

SEQ ID NO: 4690 - protein, 36 aa, synthetic construct
  REGION 1..36: note = ATaRI peptide
VEADLYLTGRTDFGSLLVYFLQNQKWQILGQYLAHR

SEQ ID NO: 4691 - protein, 23 aa, synthetic construct
  REGION 1..23: note = ATaRI peptide
RQGTHKDAGKKVWNSLSNANWGS

SEQ ID NO: 4692 - protein, 74 aa, synthetic construct
  REGION 1..74: note = ATaRI peptide
AGLKFLPTGGWKLPLWDWEVWVEWTASELIGAFFCGTLPSAWEPSSATILSFYRKTVVPWVVLLKAVKLSFSPP

SEQ ID NO: 4693 - protein, 13 aa, synthetic construct
  REGION 1..13: note = ATaRI peptide
RRVDHLLIRQDLS

SEQ ID NO: 4694 - protein, 28 aa, synthetic construct
  REGION 1..28: note = ATaRI peptide
KCKLDDDMVRPGILLRFSPETWLARGHF

SEQ ID NO: 4695 - protein, 18 aa, synthetic construct
  REGION 1..18: note = ATaRI peptide
GSPDEFSNGNAWRYIFKI

SEQ ID NO: 4696 - protein, 25 aa, synthetic construct
  REGION 1..25: note = ATaRI peptide
REQDSESQVDGNLQILFFTLQILVI

SEQ ID NO: 4697 - protein, 9 aa, synthetic construct
  REGION 1..9: note = ATaRI peptide
QSLRERCPR

SEQ ID NO: 4698 - protein, 16 aa, synthetic construct
  REGION 1..16: note = ATaRI peptide
LHQNGCIHRYLLICIY

SEQ ID NO: 4699 - protein, 17 aa, synthetic construct
  REGION 1..17: note = ATaRI peptide
TSPKHKGKVCYRVLLCF

SEQ ID NO: 4700 - protein, 9 aa, synthetic construct
  REGION 1..9: note = ATaRI peptide
RVKVFEECS

SEQ ID NO: 4701 - protein, 10 aa, synthetic construct
  REGION 1..10: note = ATaRI peptide
VEFVPFFYRK

SEQ ID NO: 4702 - protein, 11 aa, synthetic construct
  REGION 1..11: note = ATaRI peptide
HSFCDSLWVRL

SEQ ID NO: 4703 - protein, 10 aa, synthetic construct
  REGION 1..10: note = ATaRI peptide
KVVNWDIKVN

SEQ ID NO: 4704 - protein, 34 aa, synthetic construct
  REGION 1..34: note = ATaRI peptide
RLREIIFKVQTFLKHLCILRRLWVYEFSCNISIL

SEQ ID NO: 4705 - protein, 27 aa, synthetic construct
  REGION 1..27: note = ATaRI peptide
VRVAICRKVSKLLRYILMIAASPSCYK

SEQ ID NO: 4706 - protein, 9 aa, synthetic construct
  REGION 1..9: note = ATaRI peptide
RPSDEIKLT

SEQ ID NO: 4707 - protein, 16 aa, synthetic construct
  REGION 1..16: note = ATaRI peptide
GESKLKFQVKSKCFNI

SEQ ID NO: 4708 - protein, 9 aa, synthetic construct
  REGION 1..9: note = ATaRI peptide
CERGPWAKR

SEQ ID NO: 4709 - protein, 9 aa, synthetic construct
  REGION 1..9: note = ATaRI peptide
KDQTVTNPK

SEQ ID NO: 4710 - protein, 11 aa, synthetic construct
  REGION 1..11: note = ATaRI peptide
ISHIIRHMGKH

SEQ ID NO: 4711 - protein, 27 aa, synthetic construct
  REGION 1..27: note = ATaRI peptide
DDIGHGVKVGIIFFKLLKVVTHNETNS

SEQ ID NO: 4712 - protein, 30 aa, synthetic construct
  REGION 1..30: note = ATaRI peptide
YALFKNPQVRPNNLQRSGFVNMSPILFDYC

SEQ ID NO: 4713 - protein, 29 aa, synthetic construct
  REGION 1..29: note = ATaRI peptide
DVVEDKDKVDNSKNVPLCFPLQSCMFSRD

SEQ ID NO: 4714 - protein, 18 aa, synthetic construct
  REGION 1..18: note = ATaRI peptide
SPRTKDTLRYSLYTDKNI

SEQ ID NO: 4715 - protein, 9 aa, synthetic construct
  REGION 1..9: note = ATaRI peptide
PFFSSLSGR

SEQ ID NO: 4716 - protein, 16 aa, synthetic construct
  REGION 1..16: note = ATaRI peptide
GHFLPRELVMFRSQSH

SEQ ID NO: 4717 - protein, 31 aa, synthetic construct
  REGION 1..31: note = ATaRI peptide
IHGGAAFKVGRNDICTSFEKALGDVTVVLRD

SEQ ID NO: 4718 - protein, 31 aa, synthetic construct
  REGION 1..31: note = ATaRI peptide
RRPERPMEVMQILILLSQLPKLPPEYADFHS

SEQ ID NO: 4719 - protein, 36 aa, synthetic construct
  REGION 1..36: note = ATaRI peptide
CSPQDKQKGKSLFILSTANGVRKHKSVFLSKKKKKE

SEQ ID NO: 4720 - protein, 12 aa, synthetic construct
  REGION 1..12: note = ATaRI peptide
KASKSMDLGKQG

SEQ ID NO: 4721 - protein, 19 aa, synthetic construct
  REGION 1..19: note = ATaRI peptide
ELFGCRVTGEVGAPMRLGC

SEQ ID NO: 4722 - protein, 10 aa, synthetic construct
  REGION 1..10: note = ATaRI peptide
DVPLENCMGM

SEQ ID NO: 4723 - protein, 25 aa, synthetic construct
  REGION 1..25: note = ATaRI peptide
EGYEDEIDGEYCYDLAGNRKIQVWL

SEQ ID NO: 4724 - protein, 17 aa, synthetic construct
  REGION 1..17: note = ATaRI peptide
GSNEEQWKGKYVGNQSK

SEQ ID NO: 4725 - protein, 9 aa, synthetic construct
  REGION 1..9: note = ATaRI peptide
HPYHCQESR

SEQ ID NO: 4726 - protein, 9 aa, synthetic construct
  REGION 1..9: note = ATaRI peptide
VHVLRTGFR

SEQ ID NO: 4727 - protein, 14 aa, synthetic construct
  REGION 1..14: note = ATaRI peptide
FDIWKFRKVSTLTI

SEQ ID NO: 4728 - protein, 43 aa, synthetic construct
  REGION 1..43: note = ATaRI peptide
ISDREMPEGKEAADAIRPRAHLCPPPPPESPGRHPPPRAPSCR

SEQ ID NO: 4729 - protein, 35 aa, synthetic construct
  REGION 1..35: note = ATaRI peptide
FLSKSQTDGKTILFFPSKEKTENCFYFIGCIIEGI

SEQ ID NO: 4730 - protein, 9 aa, synthetic construct
  REGION 1..9: note = ATaRI peptide
PNLRTTVKW

SEQ ID NO: 4731 - protein, 11 aa, synthetic construct
  REGION 1..11: note = ATaRI peptide
KERAQNLEVRL

SEQ ID NO: 4732 - protein, 12 aa, synthetic construct
  REGION 1..12: note = ATaRI peptide
VNLFRFNKGKTY

SEQ ID NO: 4733 - protein, 28 aa, synthetic construct
  REGION 1..28: note = ATaRI peptide
EIMEGKSQVLSRGFGRLLIKRLWGSCHT

SEQ ID NO: 4734 - protein, 14 aa, synthetic construct
  REGION 1..14: note = ATaRI peptide
EDERKILLVLVQYL

SEQ ID NO: 4735 - protein, 54 aa, synthetic construct
  REGION 1..54: note = ATaRI peptide
IRNGHIATRYSDLRRFQYYLFILNEKTYLKIVRVTDFFVELGCSLFYVIDGLGC

SEQ ID NO: 4736 - protein, 16 aa, synthetic construct
  REGION 1..16: note = ATaRI peptide
EEGDDNLASEFNFLTF

SEQ ID NO: 4737 - protein, 30 aa, synthetic construct
  REGION 1..30: note = ATaRI peptide
SISDAFIKGNFIKSCMWNGVSFFHEDILRA

SEQ ID NO: 4738 - protein, 9 aa, synthetic construct
  REGION 1..9: note = ATaRI peptide
EKQAMERLL

SEQ ID NO: 4739 - protein, 34 aa, synthetic construct
  REGION 1..34: note = ATaRI peptide
RQFVHIKKVSSANVLLMLGTDEAGLIVIFVLMVI

SEQ ID NO: 4740 - protein, 13 aa, synthetic construct
  REGION 1..13: note = ATaRI peptide
CIDPIVLQVRIYY

SEQ ID NO: 4741 - protein, 45 aa, synthetic construct
  REGION 1..45: note = ATaRI peptide
TLVINVKSVSVFNFLLYFKKITAFKFICTYGRYTRIFFSLLFYLY

SEQ ID NO: 4742 - protein, 14 aa, synthetic construct
  REGION 1..14: note = ATaRI peptide
SDAVWSTKVSQTTF

SEQ ID NO: 4743 - protein, 9 aa, synthetic construct
  REGION 1..9: note = ATaRI peptide
APSACVSPW

SEQ ID NO: 4744 - protein, 9 aa, synthetic construct
  REGION 1..9: note = ATaRI peptide
IFLERYCFR

SEQ ID NO: 4745 - protein, 9 aa, synthetic construct
  REGION 1..9: note = ATaRI peptide
SYNPIPFPL

SEQ ID NO: 4746 - protein, 17 aa, synthetic construct
  REGION 1..17: note = ATaRI peptide
SSIIAFALRYYSWDFDL

SEQ ID NO: 4747 - protein, 35 aa, synthetic construct
  REGION 1..35: note = ATaRI peptide
TTETEPQPSKITHGGIFIIRFTYNYGLKKKIHKNK

SEQ ID NO: 4748 - protein, 21 aa, synthetic construct
  REGION 1..21: note = ATaRI peptide
ENQGVEPQGVLKKSKCAYSML

SEQ ID NO: 4749 - protein, 24 aa, synthetic construct
  REGION 1..24: note = ATaRI peptide
LINPHVELRKYEILYHWFGERDYS

SEQ ID NO: 4750 - protein, 11 aa, synthetic construct
  REGION 1..11: note = ATaRI peptide
ITNAVQQKVEI

SEQ ID NO: 4751 - protein, 28 aa, synthetic construct
  REGION 1..28: note = ATaRI peptide
FYGRKMAQVRVLDYVKHLATGTFCTFGS

SEQ ID NO: 4752 - protein, 15 aa, synthetic construct
  REGION 1..15: note = ATaRI peptide
STGILGGQGENFCFV

SEQ ID NO: 4753 - protein, 9 aa, synthetic construct
  REGION 1..9: note = ATaRI peptide
HLQISYKER

SEQ ID NO: 4754 - protein, 29 aa, synthetic construct
  REGION 1..29: note = ATaRI peptide
FMEDMMPKVKEVFDFGVRLLQCVHSVSIY

SEQ ID NO: 4755 - protein, 20 aa, synthetic construct
  REGION 1..20: note = ATaRI peptide
LNQSQETKVSVICMIKLPIP

SEQ ID NO: 4756 - protein, 22 aa, synthetic construct
  REGION 1..22: note = ATaRI peptide
SKWHRRNSRQVTNLKPQAIESM

SEQ ID NO: 4757 - protein, 23 aa, synthetic construct
  REGION 1..23: note = ATaRI peptide
EYNLGKEEVSCLSFNGIIAHYVL

SEQ ID NO: 4758 - protein, 9 aa, synthetic construct
  REGION 1..9: note = ATaRI peptide
NKLINDLKG

SEQ ID NO: 4759 - protein, 11 aa, synthetic construct
  REGION 1..11: note = ATaRI peptide
ERDKVVGQVKI

SEQ ID NO: 4760 - protein, 16 aa, synthetic construct
  REGION 1..16: note = ATaRI peptide
TLHPAVHAGKWLVSLM

SEQ ID NO: 4761 - protein, 26 aa, synthetic construct
  REGION 1..26: note = ATaRI peptide
SFKHVSPAGKALCSGKLQNCSKGISS

SEQ ID NO: 4762 - protein, 9 aa, synthetic construct
  REGION 1..9: note = ATaRI peptide
KCDISLQFL

SEQ ID NO: 4763 - protein, 9 aa, synthetic construct
  REGION 1..9: note = ATaRI peptide
LGFCKSSQV

SEQ ID NO: 4764 - protein, 42 aa, synthetic construct
  REGION 1..42: note = ATaRI peptide
PHIKHNYEVKPKVLMLFFFFSSFILSSVSQLLMFMTITWGSC

SEQ ID NO: 4765 - protein, 12 aa, synthetic construct
  REGION 1..12: note = ATaRI peptide
AFREEAIKVMLS

SEQ ID NO: 4766 - protein, 21 aa, synthetic construct
  REGION 1..21: note = ATaRI peptide
HFWEIVVQGKLSFAFFFKKYF

SEQ ID NO: 4767 - protein, 10 aa, synthetic construct
  REGION 1..10: note = ATaRI peptide
SMNDYSALSK

SEQ ID NO: 4768 - protein, 10 aa, synthetic construct
  REGION 1..10: note = ATaRI peptide
KQMDSRRYGK

SEQ ID NO: 4769 - protein, 9 aa, synthetic construct
  REGION 1..9: note = ATaRI peptide
MPFQRAGVK

SEQ ID NO: 4770 - protein, 26 aa, synthetic construct
  REGION 1..26: note = ATaRI peptide
TPFKVVIIVRNLAKSLSTLSLWKLSL

SEQ ID NO: 4771 - protein, 9 aa, synthetic construct
  REGION 1..9: note = ATaRI peptide
AEAKIPSVM

SEQ ID NO: 4772 - protein, 62 aa, synthetic construct
  REGION 1..62: note = ATaRI peptide
AELFWNPGVRDAEDSDTPQACSWLWAGSSECRSGKVWFPFYPFIILPTSQFSLPLSTSMLID

SEQ ID NO: 4773 - protein, 40 aa, synthetic construct
  REGION 1..40: note = ATaRI peptide
KGTADDYLWYGLVGWPGSWSRARVETDDMFTLLPKCFCFC

SEQ ID NO: 4774 - protein, 9 aa, synthetic construct
  REGION 1..9: note = ATaRI peptide
PMKAVGLAW

SEQ ID NO: 4775 - protein, 33 aa, synthetic construct
  REGION 1..33: note = ATaRI peptide
EENGAIPKVRGGQVGPRGHLDSVFRALGEGAPD

SEQ ID NO: 4776 - protein, 98 aa, synthetic construct
  REGION 1..98: note = ATaRI peptide
KVEYKDHKVQYILWKRNGFLGFFVCFSFFFFFETESRSVAQTRVQWCNPGSLQPLPPGLKWFSCLSLLSSWDYRPASPCLAFFFLIFSRYGVSPCWSG

SEQ ID NO: 4777 - protein, 25 aa, synthetic construct
  REGION 1..25: note = ATaRI peptide
RLTSLGVIGKLLELFCKPEILTVVV

SEQ ID NO: 4778 - protein, 67 aa, synthetic construct
  REGION 1..67: note = ATaRI peptide
STISPCFKVMNIEREMTFTLEICLPLSLFLFPNPFPELRRDFAVTELMAVLFCSRIAIQNHLRLGIL

SEQ ID NO: 4779 - protein, 35 aa, synthetic construct
  REGION 1..35: note = ATaRI peptide
PFIAGHVTSESSGFPGLLDFPVLPLNYFPFTSPTI

SEQ ID NO: 4780 - protein, 9 aa, synthetic construct
  REGION 1..9: note = ATaRI peptide
TGEVPSAPR

SEQ ID NO: 4781 - protein, 27 aa, synthetic construct
  REGION 1..27: note = ATaRI peptide
QLHEAGGQVMGRKTLWMGSRLFSQMEH

SEQ ID NO: 4782 - protein, 37 aa, synthetic construct
  REGION 1..37: note = ATaRI peptide
QESNSLQQVSTRPEASEDLQRFFFLDLSHSDCHLSLV

SEQ ID NO: 4783 - protein, 34 aa, synthetic construct
  REGION 1..34: note = ATaRI peptide
TLRRDSLMVICSHFQISVSPIILRVSPIPFLMTM

SEQ ID NO: 4784 - protein, 14 aa, synthetic construct
  REGION 1..14: note = ATaRI peptide
EVAAHLLQVLGQLA

SEQ ID NO: 4785 - protein, 24 aa, synthetic construct
  REGION 1..24: note = ATaRI peptide
QQEPGIHQVYPTALMNHDDQGPYS

SEQ ID NO: 4786 - protein, 20 aa, synthetic construct
  REGION 1..20: note = ATaRI peptide
WTHLIGILGMLAMFLVHLEQ

SEQ ID NO: 4787 - protein, 36 aa, synthetic construct
  REGION 1..36: note = ATaRI peptide
QLKSVTINGEEQLPYPAPGRKPQPQPQQPPPQTAAL

SEQ ID NO: 4788 - protein, 19 aa, synthetic construct
  REGION 1..19: note = ATaRI peptide
RSCAVGFSGKGDKILRLHA

SEQ ID NO: 4789 - protein, 21 aa, synthetic construct
  REGION 1..21: note = ATaRI peptide
PTTPQNEEVSRTLVSPEFEIM

SEQ ID NO: 4790 - protein, 12 aa, synthetic construct
  REGION 1..12: note = ATaRI peptide
LNKGTPSQVSSL

SEQ ID NO: 4791 - protein, 33 aa, synthetic construct
  REGION 1..33: note = ATaRI peptide
SPFQPQTTGRASPALCLNVYFTKQNSLNVVLKN

SEQ ID NO: 4792 - protein, 19 aa, synthetic construct
  REGION 1..19: note = ATaRI peptide
AFPLQATHSKFCCQVGILY

SEQ ID NO: 4793 - protein, 12 aa, synthetic construct
  REGION 1..12: note = ATaRI peptide
DNIFSAGQGIKL

SEQ ID NO: 4794 - protein, 81 aa, synthetic construct
  REGION 1..81: note = ATaRI peptide
VKYIVRLLRYVTLTFSLCKCLRKEECAKGWAVGFLGFFSLTIVEFLKGKFELDHKNKECIFPLTDHHRYYYFNLVISYMMY

SEQ ID NO: 4795 - protein, 17 aa, synthetic construct
  REGION 1..17: note = ATaRI peptide
QTSHRFAKVTVNYFMSI

SEQ ID NO: 4796 - protein, 10 aa, synthetic construct
  REGION 1..10: note = ATaRI peptide
HIYKSFKNGN

SEQ ID NO: 4797 - protein, 11 aa, synthetic construct
  REGION 1..11: note = ATaRI peptide
WPLRRLMEVFQ

SEQ ID NO: 4798 - protein, 12 aa, synthetic construct
  REGION 1..12: note = ATaRI peptide
RIYYRNKKVIIT

SEQ ID NO: 4799 - protein, 10 aa, synthetic construct
  REGION 1..10: note = ATaRI peptide
QCWVKLNTCK

SEQ ID NO: 4800 - protein, 18 aa, synthetic construct
  REGION 1..18: note = ATaRI peptide
LITNKMFEVSKVYYVTIW

SEQ ID NO: 4801 - protein, 48 aa, synthetic construct
  REGION 1..48: note = ATaRI peptide
CAQKAEPTGKTDWVGMNGEEPRGPGWWQRKSLMHNTRRHLFNKQGKIT

SEQ ID NO: 4802 - protein, 13 aa, synthetic construct
  REGION 1..13: note = ATaRI peptide
FRESFKKRGKRKL

SEQ ID NO: 4803 - protein, 17 aa, synthetic construct
  REGION 1..17: note = ATaRI peptide
QKKRWQQRGKKKKIHFK

SEQ ID NO: 4804 - protein, 36 aa, synthetic construct
  REGION 1..36: note = ATaRI peptide
LYKERFKQGEFTGPSTIFSWKISTQIAYCLGVDTCL

SEQ ID NO: 4805 - protein, 35 aa, synthetic construct
  REGION 1..35: note = ATaRI peptide
DLQLIDFEVRNQFLIFKKQYPVHNSFPYVLSFGTL

SEQ ID NO: 4806 - protein, 9 aa, synthetic construct
  REGION 1..9: note = ATaRI peptide
VTKRQSLKV

SEQ ID NO: 4807 - protein, 45 aa, synthetic construct
  REGION 1..45: note = ATaRI peptide
IIGNYRLSGKALSCRLLSCCSAHRSFFPEFDVAKFHFNWKFLIFL

SEQ ID NO: 4808 - protein, 18 aa, synthetic construct
  REGION 1..18: note = ATaRI peptide
TVPGSEKDRYKYLFLHQN

SEQ ID NO: 4809 - protein, 45 aa, synthetic construct
  REGION 1..45: note = ATaRI peptide
IESLCRDKVRSHTSLTVHLSPACKKHLTSLEINSVPIRTCRYTYS

SEQ ID NO: 4810 - protein, 30 aa, synthetic construct
  REGION 1..30: note = ATaRI peptide
IRRLLHVAVSTLTFLGNGVDGKACRWTISV

SEQ ID NO: 4811 - protein, 33 aa, synthetic construct
  REGION 1..33: note = ATaRI peptide
DSKSLTIQVTFCLFFIPVDNSGCSQLVENAAVG

SEQ ID NO: 4812 - protein, 17 aa, synthetic construct
  REGION 1..17: note = ATaRI peptide
KENGQSNKGKSSRFKFV

SEQ ID NO: 4813 - protein, 9 aa, synthetic construct
  REGION 1..9: note = ATaRI peptide
GALQKFSLR

SEQ ID NO: 4814 - protein, 11 aa, synthetic construct
  REGION 1..11: note = ATaRI peptide
VSLASRMKVRY

SEQ ID NO: 4815 - protein, 51 aa, synthetic construct
  REGION 1..51: note = ATaRI peptide
TQQQVEAEVRKERNICFSLQAYLFIRLQCLCFCFANLGVDETSSHQQVGLG

SEQ ID NO: 4816 - protein, 9 aa, synthetic construct
  REGION 1..9: note = ATaRI peptide
NLITTAFFW

SEQ ID NO: 4817 - protein, 14 aa, synthetic construct
  REGION 1..14: note = ATaRI peptide
HEAFIPSPVSSINL

SEQ ID NO: 4818 - protein, 16 aa, synthetic construct
  REGION 1..16: note = ATaRI peptide
PPLSLTLRVGPCLSSL

SEQ ID NO: 4819 - protein, 9 aa, synthetic construct
  REGION 1..9: note = ATaRI peptide
IPAGQKQTR

SEQ ID NO: 4820 - protein, 14 aa, synthetic construct
  REGION 1..14: note = ATaRI peptide
AKVPSRGDGMYLWE

SEQ ID NO: 4821 - protein, 19 aa, synthetic construct
  REGION 1..19: note = ATaRI peptide
EGLKHLEQVKILLILFVSS

SEQ ID NO: 4822 - protein, 74 aa, synthetic construct
  REGION 1..74: note = ATaRI peptide
QQFQTLKMRLVVIPLCVIWGACVVKEREERRNSGIVCDFWHWNTPNTYLHVVCKKVYFKKIFQVEISVYLVFYS

SEQ ID NO: 4823 - protein, 13 aa, synthetic construct
  REGION 1..13: note = ATaRI peptide
QPTASQPTGKNLD

SEQ ID NO: 4824 - protein, 9 aa, synthetic construct
  REGION 1..9: note = ATaRI peptide
KNKNNASLR

SEQ ID NO: 4825 - protein, 9 aa, synthetic construct
  REGION 1..9: note = ATaRI peptide
PPQQPQQQV

SEQ ID NO: 4826 - protein, 56 aa, synthetic construct
  REGION 1..56: note = ATaRI peptide
EFHSSCLESKWLLSHLLGRTARSLLINTFHTWHFAPYLLSLERTHEADQRSGAAGG

SEQ ID NO: 4827 - protein, 61 aa, synthetic construct
  REGION 1..61: note = ATaRI peptide
ELHKKRGEVKLALFLICLLPSMRVLWGAGELSHFSPELAAALAICGIKSPLHRNKRVRKTE

SEQ ID NO: 4828 - protein, 12 aa, synthetic construct
  REGION 1..12: note = ATaRI peptide
TSIEFDSAVSIE

SEQ ID NO: 4829 - protein, 72 aa, synthetic construct
  REGION 1..72: note = ATaRI peptide
SDWTRVVFRLVVTHPPPIWFITKSPAWAFSHWGYRAKFCSVPNLCFQECACKFIIAGHHYCLFLSSVPFVIT

SEQ ID NO: 4830 - protein, 9 aa, synthetic construct
  REGION 1..9: note = ATaRI peptide
EKVLSKQHR

SEQ ID NO: 4831 - protein, 10 aa, synthetic construct
  REGION 1..10: note = ATaRI peptide
DIIEDADGVC

SEQ ID NO: 4832 - protein, 34 aa, synthetic construct
  REGION 1..34: note = ATaRI peptide
RCLWCKAMVSVGPAPGLEGRACSLPCPCGPCGSA

SEQ ID NO: 4833 - protein, 9 aa, synthetic construct
  REGION 1..9: note = ATaRI peptide
RASTKMLDR

SEQ ID NO: 4834 - protein, 41 aa, synthetic construct
  REGION 1..41: note = ATaRI peptide
ESEVMAKKVCSRALGGRGIEAARSLLCHQQRAVTAGCPGSW

SEQ ID NO: 4835 - protein, 25 aa, synthetic construct
  REGION 1..25: note = ATaRI peptide
PKGRSQRKGTCASTSLCAPSCAWFW

SEQ ID NO: 4836 - protein, 9 aa, synthetic construct
  REGION 1..9: note = ATaRI peptide
RDEHPEKCR

SEQ ID NO: 4837 - protein, 71 aa, synthetic construct
  REGION 1..71: note = ATaRI peptide
LQHHRIAQVVAMVLGCLAESPARSVLNSGAVHGAWEGGRFPGPCGCLMSCPGQLVAPLPGPEPFPCAMLDS

SEQ ID NO: 4838 - protein, 48 aa, synthetic construct
  REGION 1..48: note = ATaRI peptide
AHSSLGAPGTCLSPACVSGRPRLLDRPRSPGLCFLPWPCSSSLLVPVL

SEQ ID NO: 4839 - protein, 11 aa, synthetic construct
  REGION 1..11: note = ATaRI peptide
HLERRDLKVLP

SEQ ID NO: 4840 - protein, 47 aa, synthetic construct
  REGION 1..47: note = ATaRI peptide
ETSFNDIKGELLGNRTVAKGERWDFQVGIQELFCFKDCQFSIQIVKV

SEQ ID NO: 4841 - protein, 24 aa, synthetic construct
  REGION 1..24: note = ATaRI peptide
EGGPPEAQVSIHACPKPAFFPFVF

SEQ ID NO: 4842 - protein, 55 aa, synthetic construct
  REGION 1..55: note = ATaRI peptide
VLAQLLIWVGGRHAWQRTGPQEALSALFCFRGHLSGRRLLFSICKWKQFLMGNSD

SEQ ID NO: 4843 - protein, 15 aa, synthetic construct
  REGION 1..15: note = ATaRI peptide
QMRESDNPGTYLIGR

SEQ ID NO: 4844 - protein, 56 aa, synthetic construct
  REGION 1..56: note = ATaRI peptide
KDPATRTQVGPALSPAPSLWVWGPPAAMGSAARRKEVNLPCPALPKWQRGEGRAER

SEQ ID NO: 4845 - protein, 9 aa, synthetic construct
  REGION 1..9: note = ATaRI peptide
PRGIRYKHV

SEQ ID NO: 4846 - protein, 22 aa, synthetic construct
  REGION 1..22: note = ATaRI peptide
LPVEEAVKGNFGLLFTYKENGK

SEQ ID NO: 4847 - protein, 13 aa, synthetic construct
  REGION 1..13: note = ATaRI peptide
PEKDFTEKVRNRS

SEQ ID NO: 4848 - protein, 19 aa, synthetic construct
  REGION 1..19: note = ATaRI peptide
MQGLKEMKVPIHRRVVSRY

SEQ ID NO: 4849 - protein, 47 aa, synthetic construct
  REGION 1..47: note = ATaRI peptide
EWKDKKIGVGFPSLENLLKWAACLANRVFSESLVCKTACLSMHATPT

SEQ ID NO: 4850 - protein, 41 aa, synthetic construct
  REGION 1..41: note = ATaRI peptide
KSTGDGTLGKYLLSFGSSHLSTQHWFTLHALLGLEPPSLMG

SEQ ID NO: 4851 - protein, 52 aa, synthetic construct
  REGION 1..52: note = ATaRI peptide
GRRGPGPARCGSGFRWAPRSGPGPGGAGCEPGSGSGAGRGPGLGRSRGPGRV

SEQ ID NO: 4852 - protein, 19 aa, synthetic construct
  REGION 1..19: note = ATaRI peptide
IGKCCLNKVLLLSWHFELT

SEQ ID NO: 4853 - protein, 12 aa, synthetic construct
  REGION 1..12: note = ATaRI peptide
EHDKPEKKVKSC

SEQ ID NO: 4854 - protein, 33 aa, synthetic construct
  REGION 1..33: note = ATaRI peptide
RRSKNSVEGTAKLIYVAENMDISFFFFCLNLNV

SEQ ID NO: 4855 - protein, 9 aa, synthetic construct
  REGION 1..9: note = ATaRI peptide
SMEALQMDR

SEQ ID NO: 4856 - protein, 76 aa, synthetic construct
  REGION 1..76: note = ATaRI peptide
ELEEEEKHGESWARVCMYVHVCVLMHLLHVGLEGSSARDCCVPGSGLGHTGGITLVVHRTLRAWITLKAMAAAPHP

SEQ ID NO: 4857 - protein, 24 aa, synthetic construct
  REGION 1..24: note = ATaRI peptide
LQVFKEARSKWLEFSSDLWAGLIE

SEQ ID NO: 4858 - protein, 112 aa, synthetic construct
  REGION 1..112: note = ATaRI peptide
SPAEQKKQVNKCLLLFFFFQCFSIYGPVRGSLRSKLFCLRQGLSLSPRLECSGSILAHCNLNLLGSSSPPASAFAGSPDLSTHHHAQLIFLFFCRDGVLLCCPGWSQIPGLK

SEQ ID NO: 4859 - protein, 9 aa, synthetic construct
  REGION 1..9: note = ATaRI peptide
SGQGHRLGR

SEQ ID NO: 4860 - protein, 9 aa, synthetic construct
  REGION 1..9: note = ATaRI peptide
LKPADIGPR

SEQ ID NO: 4861 - protein, 22 aa, synthetic construct
  REGION 1..22: note = ATaRI peptide
GHHVEAAPGGAVWGAVGAVSGF

SEQ ID NO: 4862 - protein, 83 aa, synthetic construct
  REGION 1..83: note = ATaRI peptide
CCVLSPRAGEARGQHGRAAASVPPTARPQAHCSFLCDWLHSPVRTKWEEVSLFSRVVSSVCDLPLLSSSRGTWPFSPLTSPFH

SEQ ID NO: 4863 - protein, 31 aa, synthetic construct
  REGION 1..31: note = ATaRI peptide
AVGLHLWKVTQPRLAHARFSRWCGGPWRSGF

SEQ ID NO: 4864 - protein, 38 aa, synthetic construct
  REGION 1..38: note = ATaRI peptide
RRRKLLSKGVEESLTKSYVVGMGAVVLRVLDFIPFESF

SEQ ID NO: 4865 - protein, 9 aa, synthetic construct
  REGION 1..9: note = ATaRI peptide
NLEALTELE

SEQ ID NO: 4866 - protein, 15 aa, synthetic construct
  REGION 1..15: note = ATaRI peptide
ELGSNRIRVGADSPD

SEQ ID NO: 4867 - protein, 57 aa, synthetic construct
  REGION 1..57: note = ATaRI peptide
VIEGLENNVRHPLSVWGCVGGGHQAGRHLASQHTLASRAGVRKMPCLWRFIRKTFPS

SEQ ID NO: 4868 - protein, 9 aa, synthetic construct
  REGION 1..9: note = ATaRI peptide
AAAHNRTCR

SEQ ID NO: 4869 - protein, 49 aa, synthetic construct
  REGION 1..49: note = ATaRI peptide
FQNTQSYWVSAYDVPRRGAFGPAVMTAARSFIIATSSALNVFAIKIYSC

SEQ ID NO: 4870 - protein, 39 aa, synthetic construct
  REGION 1..39: note = ATaRI peptide
LLTSHLLQCEYLPASGEHSLTMAQIYPHSELQLVADVFA

SEQ ID NO: 4871 - protein, 9 aa, synthetic construct
  REGION 1..9: note = ATaRI peptide
ILEFHQKHV

SEQ ID NO: 4872 - protein, 89 aa, synthetic construct
  REGION 1..89: note = ATaRI peptide
CARCCCAWVSAPWWDPQLRLLPCWAAASLRGRDGGPAQGRPPPAWDGQALGTGPPRRVLPDLPSQASHATGPPISCLLSPDFSHAGHKQ

SEQ ID NO: 4873 - protein, 90 aa, synthetic construct
  REGION 1..90: note = ATaRI peptide
VAGHIFSAGMPSLPVPWDLREGSRVCGSGSQGPHELAPTHPGAAQCPPVPSHCCRCQELPSHQRGLKPQHSGSLVVLQAGGHAEQLAQAS

SEQ ID NO: 4874 - protein, 31 aa, synthetic construct
  REGION 1..31: note = ATaRI peptide
YRKNFPAIGKYSVLLQRGTKYVFRKEENLRL

SEQ ID NO: 4875 - protein, 56 aa, synthetic construct
  REGION 1..56: note = ATaRI peptide
DWCQQVKKVCSRPTPTAELSHPGRQAVGRAGVEGLRPGLRQPHWAVGSFVPPGTAM

SEQ ID NO: 4876 - protein, 174 aa, synthetic construct
  REGION 1..174: note = ATaRI peptide
KDTTLNWKVRIPELHTRKRGEVAQDDTVVAGTVVSAKLLPFPSGPPRCGAPGVVVQGFSVPANSFFFETESCSGCQPRLECNGTISAHCNLRFLGSSDSPASASRVAGITGTCHHAWLIFFVEMGFLHVGQAGLQLLTSGDLPTSASQSAGIIGMSHRARPVPANSNPMSFAKC

SEQ ID NO: 4877 - protein, 247 aa, synthetic construct
  REGION 1..247: note = ATaRI peptide
MYLEHYLDSKRAPRAPRPPPTRSPPCRSPPRAGHRMQTPWAREGGGRGRARRGARGRGGAGPQGRGGRGGRARGVPPAGSRQFQVRHGGAGPGDAGRGLRPRPRPHIRSRPYPGPASSPPPAPAPAPPGPARPCPVCRRSWRPLRGSGPWGLRGLGLRLAVRPCAPASCVTAAGEGVRAAGRLSPALGTAARRRGGRCRVGPGGRAVLFPGGSRSAPPAAERTVLSLTLHTREGPALPSSLLRVSRS

SEQ ID NO: 4878 - protein, 72 aa, synthetic construct
  REGION 1..72: note = ATaRI peptide
VLSFHSVSGKPVPPVGAQESLLVLVEFFLASVCNCGVLGWVNELGPALGKEPASVAWPPSPTSPGPSRHACW

SEQ ID NO: 4879 - protein, 63 aa, synthetic construct
  REGION 1..63: note = ATaRI peptide
GTVLGLEVVSWGSCLVQRSPRGVLSRLSWAHVVAQVHGAPRGGRSWFLALGPSRMCGLHTPPS

SEQ ID NO: 4880 - protein, 88 aa, synthetic construct
  REGION 1..88: note = ATaRI peptide
LHLASPVQGTDPPHRGQLVLQLLLHVWTHGTAQRPRVGGGCPGGRVGGPWAEHGVAVGLMCKKAALNIFRTKNRLPWSCVRFVVTQIS

SEQ ID NO: 4881 - protein, 115 aa, synthetic construct
  REGION 1..115: note = ATaRI peptide
VQMASPKEVFRGSPPPSCCCPKMTRRLREPFPPGTDVGPGLFGSRIVKGTNIEDKGTGSQDYSRRKNGFVSRLPPLLKRISCIHHMLSVYILNCGSSQGGPFPLPGFFGPCMHYS

SEQ ID NO: 4882 - protein, 25 aa, synthetic construct
  REGION 1..25: note = ATaRI peptide
VVRHRRASVSRRVVSAVPLEYNEQT

SEQ ID NO: 4883 - protein, 15 aa, synthetic construct
  REGION 1..15: note = ATaRI peptide
VMANVVDMVSSCCPC

SEQ ID NO: 4884 - protein, 35 aa, synthetic construct
  REGION 1..35: note = ATaRI peptide
WGYDISQVVSMCSTLNFQYYHDTFGKLLSLLIYCS

SEQ ID NO: 4885 - protein, 59 aa, synthetic construct
  REGION 1..59: note = ATaRI peptide
HIHYGVRVVSNLQQNGFNLGLINGTNKCLRVERRQWKILKRKLLIIVAVRVLGYSLNFG

SEQ ID NO: 4886 - protein, 51 aa, synthetic construct
  REGION 1..51: note = ATaRI peptide
SKKLIGTAGNVPEPGEGAWGAGPAGLYSQECPLGHGPALPAWRRLVITEFG

SEQ ID NO: 4887 - protein, 9 aa, synthetic construct
  REGION 1..9: note = ATaRI peptide
YTVELFEQV

SEQ ID NO: 4888 - protein, 9 aa, synthetic construct
  REGION 1..9: note = ATaRI peptide
NRTIVLHDT

SEQ ID NO: 4889 - protein, 27 aa, synthetic construct
  REGION 1..27: note = ATaRI peptide
MDEFGLCKVATPSAFSTFLFKSVIVNY

SEQ ID NO: 4890 - protein, 9 aa, synthetic construct
  REGION 1..9: note = ATaRI peptide
MSNMLYACR

SEQ ID NO: 4891 - protein, 16 aa, synthetic construct
  REGION 1..16: note = ATaRI peptide
DEFYSSLRVNFLSCSH

SEQ ID NO: 4892 - protein, 18 aa, synthetic construct
  REGION 1..18: note = ATaRI peptide
ALDAGTAKGIGGFLGVRN

SEQ ID NO: 4893 - protein, 19 aa, synthetic construct
  REGION 1..19: note = ATaRI peptide
KPETFESLASFIYGSSCGI

SEQ ID NO: 4894 - protein, 9 aa, synthetic construct
  REGION 1..9: note = ATaRI peptide
PAEIPELKK

SEQ ID NO: 4895 - protein, 15 aa, synthetic construct
  REGION 1..15: note = ATaRI peptide
KLKTGTVGVSCESGC

SEQ ID NO: 4896 - protein, 24 aa, synthetic construct
  REGION 1..24: note = ATaRI peptide
HFKETQTHGNIFLLLPVLFSGQLH

SEQ ID NO: 4897 - protein, 10 aa, synthetic construct
  REGION 1..10: note = ATaRI peptide
TSLCAGPSGK

SEQ ID NO: 4898 - protein, 14 aa, synthetic construct
  REGION 1..14: note = ATaRI peptide
TLLHYDPVGKIWGG

SEQ ID NO: 4899 - protein, 9 aa, synthetic construct
  REGION 1..9: note = ATaRI peptide
HLFEHILNG

SEQ ID NO: 4900 - protein, 61 aa, synthetic construct
  REGION 1..61: note = ATaRI peptide
KLILLITQVSKSYCSGLKLLDMVGMERGIRIILRQGLALSLRLHCGSMIIAHCSLAQVPPK

SEQ ID NO: 4901 - protein, 11 aa, synthetic construct
  REGION 1..11: note = ATaRI peptide
QGANPAFRVRG

SEQ ID NO: 4902 - protein, 10 aa, synthetic construct
  REGION 1..10: note = ATaRI peptide
RVVIAGQKVQ

SEQ ID NO: 4903 - protein, 31 aa, synthetic construct
  REGION 1..31: note = ATaRI peptide
HVTSKVNTGRSNQKVNHLLQCFNFICRIPNI

SEQ ID NO: 4904 - protein, 34 aa, synthetic construct
  REGION 1..34: note = ATaRI peptide
FGTTNFAPGNSSAYFLNLNSLEYKRFKILHVNRI

SEQ ID NO: 4905 - protein, 87 aa, synthetic construct
  REGION 1..87: note = ATaRI peptide
PLGRPPSSGEPAQGPGSPPRSPAPSPSGHSWCSIPDRGPMGSLQLRALKRSVFVQASKSYPTIFAGPPSHPTQYLSTLLGPWLWWST

SEQ ID NO: 4906 - protein, 9 aa, synthetic construct
  REGION 1..9: note = ATaRI peptide
AFGNAFLNR

SEQ ID NO: 4907 - protein, 25 aa, synthetic construct
  REGION 1..25: note = ATaRI peptide
FPNLKRMQVARAGVSKTRDSVPRAG

SEQ ID NO: 4908 - protein, 20 aa, synthetic construct
  REGION 1..20: note = ATaRI peptide
IAVIVTGQGKIVFVYSHPKL

SEQ ID NO: 4909 - protein, 13 aa, synthetic construct
  REGION 1..13: note = ATaRI peptide
YVSLPNEEVCICV

SEQ ID NO: 4910 - protein, 9 aa, synthetic construct
  REGION 1..9: note = ATaRI peptide
QKELAQLAR

SEQ ID NO: 4911 - protein, 94 aa, synthetic construct
  REGION 1..94: note = ATaRI peptide
GSCAAPYHGELAVGVRVSAVADSVYLIWSRSDLEIPQPPRGGVIGVEVGPLGRSGCLPKCSPSEFWSLSVPHLFRRRSRSRPRCRQSFQLLASF

SEQ ID NO: 4912 - protein, 24 aa, synthetic construct
  REGION 1..24: note = ATaRI peptide
RLVAADRRVSYSLTPILIIAQTTL

SEQ ID NO: 4913 - protein, 9 aa, synthetic construct
  REGION 1..9: note = ATaRI peptide
FLEQPEIHT

SEQ ID NO: 4914 - protein, 91 aa, synthetic construct
  REGION 1..91: note = ATaRI peptide
YSGKVLLQVRCFFQCTCLILAMFFYQIKKLYVLFYKIVKFLFLFFNFNFFFFFFRDRSLLCHLDWSTVVGSRLTAALTSQAQRTLPPQSPE

SEQ ID NO: 4915 - protein, 14 aa, synthetic construct
  REGION 1..14: note = ATaRI peptide
QLDKLIREVRWNSK

SEQ ID NO: 4916 - protein, 122 aa, synthetic construct
  REGION 1..122: note = ATaRI peptide
AQAGFYHQVKKEYKKILFSVGLCSPQQNYHIFLTFSETYFVHLVCLLVCMDACFFGPGWSAAPQCWLNCNLRLSGSSDSCASASLSSWEYRCAPSHLANFCIFSRDGVSPCCQGWSQTPDLR

SEQ ID NO: 4917 - protein, 14 aa, synthetic construct
  REGION 1..14: note = ATaRI peptide
NPSSPGISGMILNF

SEQ ID NO: 4918 - protein, 49 aa, synthetic construct
  REGION 1..49: note = ATaRI peptide
HMDVEESQCELNYRAVVHDSKRSSDLNATCRARFPYGLQKLGFKNTIKK

SEQ ID NO: 4919 - protein, 24 aa, synthetic construct
  REGION 1..24: note = ATaRI peptide
LTSPKLVKGEVIHFTKAELIIPQL

SEQ ID NO: 4920 - protein, 9 aa, synthetic construct
  REGION 1..9: note = ATaRI peptide
KKTSISKER

SEQ ID NO: 4921 - protein, 10 aa, synthetic construct
  REGION 1..10: note = ATaRI peptide
FLPAATTGGM

SEQ ID NO: 4922 - protein, 16 aa, synthetic construct
  REGION 1..16: note = ATaRI peptide
PMEALLQTRYFSISND

SEQ ID NO: 4923 - protein, 20 aa, synthetic construct
  REGION 1..20: note = ATaRI peptide
QLLKLQQQVGDYLALCSCCL

SEQ ID NO: 4924 - protein, 14 aa, synthetic construct
  REGION 1..14: note = ATaRI peptide
IIIERMHSGNLLLS

SEQ ID NO: 4925 - protein, 16 aa, synthetic construct
  REGION 1..16: note = ATaRI peptide
LSLLHASNGLYLAYIF

SEQ ID NO: 4926 - protein, 9 aa, synthetic construct
  REGION 1..9: note = ATaRI peptide
QLLIFPQDR

SEQ ID NO: 4927 - protein, 9 aa, synthetic construct
  REGION 1..9: note = ATaRI peptide
KLKQATSKV

SEQ ID NO: 4928 - protein, 27 aa, synthetic construct
  REGION 1..27: note = ATaRI peptide
CMLQDILAGVLGFFFIEYVKITLSLLN

SEQ ID NO: 4929 - protein, 9 aa, synthetic construct
  REGION 1..9: note = ATaRI peptide
PLAAKVFKV

SEQ ID NO: 4930 - protein, 15 aa, synthetic construct
  REGION 1..15: note = ATaRI peptide
TVSVSVSQGKCMFIF

SEQ ID NO: 4931 - protein, 9 aa, synthetic construct
  REGION 1..9: note = ATaRI peptide
MLQVHHVQV

SEQ ID NO: 4932 - protein, 12 aa, synthetic construct
  REGION 1..12: note = ATaRI peptide
IPVISLNQGKIY

SEQ ID NO: 4933 - protein, 10 aa, synthetic construct
  REGION 1..10: note = ATaRI peptide
GTNQHSPQVI

SEQ ID NO: 4934 - protein, 17 aa, synthetic construct
  REGION 1..17: note = ATaRI peptide
ACGYMGRQVSSSQQQLQ

SEQ ID NO: 4935 - protein, 11 aa, synthetic construct
  REGION 1..11: note = ATaRI peptide
AASGSDPTGDN

SEQ ID NO: 4936 - protein, 15 aa, synthetic construct
  REGION 1..15: note = ATaRI peptide
YKRLHPEKGMCIILL

SEQ ID NO: 4937 - protein, 24 aa, synthetic construct
  REGION 1..24: note = ATaRI peptide
NSSVNQTEVGSLLIISVIKKTRFN

SEQ ID NO: 4938 - protein, 9 aa, synthetic construct
  REGION 1..9: note = ATaRI peptide
STDLDTTER

SEQ ID NO: 4939 - protein, 10 aa, synthetic construct
  REGION 1..10: note = ATaRI peptide
LAENCIDQGM

SEQ ID NO: 4940 - protein, 36 aa, synthetic construct
  REGION 1..36: note = ATaRI peptide
SQLQIDLTGKTYFLWIIDFIFMIKLYTLAVCIVCWY

SEQ ID NO: 4941 - protein, 15 aa, synthetic construct
  REGION 1..15: note = ATaRI peptide
TPQEHLTKASRTLSY

SEQ ID NO: 4942 - protein, 26 aa, synthetic construct
  REGION 1..26: note = ATaRI peptide
ERAMRQTQVRINVAICVLLPTLYCYQ

SEQ ID NO: 4943 - protein, 25 aa, synthetic construct
  REGION 1..25: note = ATaRI peptide
VPPHWAIQVFLLFVIGYGNYLALER

SEQ ID NO: 4944 - protein, 54 aa, synthetic construct
  REGION 1..54: note = ATaRI peptide
RCVTLEPDVSLFDLLSLRGSLLSKLLKLYCMVQNSNSFCVGGKCTFEGRSYLKV

SEQ ID NO: 4945 - protein, 15 aa, synthetic construct
  REGION 1..15: note = ATaRI peptide
LTATNFRVGEFLHGP

SEQ ID NO: 4946 - protein, 38 aa, synthetic construct
  REGION 1..38: note = ATaRI peptide
FQETIGSQVNIITEPALAVSYRYGIILTRKPDLIKMLF

SEQ ID NO: 4947 - protein, 10 aa, synthetic construct
  REGION 1..10: note = ATaRI peptide
CQKCPKKPCK

SEQ ID NO: 4948 - protein, 12 aa, synthetic construct
  REGION 1..12: note = ATaRI peptide
RVNNTFCQGKTN

SEQ ID NO: 4949 - protein, 10 aa, synthetic construct
  REGION 1..10: note = ATaRI peptide
DPTFSSCVRK

SEQ ID NO: 4950 - protein, 34 aa, synthetic construct
  REGION 1..34: note = ATaRI peptide
GPGVAEPEGESGNGSWTLDIYLCVFALISLFITL

SEQ ID NO: 4951 - protein, 27 aa, synthetic construct
  REGION 1..27: note = ATaRI peptide
VATAPPEKVIYSLLASLFFSTLKVIFY

SEQ ID NO: 4952 - protein, 56 aa, synthetic construct
  REGION 1..56: note = ATaRI peptide
VIAPTQVTGWCSIFTLYITWRRRGAELHFKCSIHYISLLMAGLAILANIWKSSKYS

SEQ ID NO: 4953 - protein, 23 aa, synthetic construct
  REGION 1..23: note = ATaRI peptide
TPDHKHCRGKYCDQVSHFYLNFI

SEQ ID NO: 4954 - protein, 13 aa, synthetic construct
  REGION 1..13: note = ATaRI peptide
SGLGDHCEGKNCS

SEQ ID NO: 4955 - protein, 38 aa, synthetic construct
  REGION 1..38: note = ATaRI peptide
LDDNKTCQGISCSFFPSHYLRNSSILPCCQMIVCGFAM

SEQ ID NO: 4956 - protein, 22 aa, synthetic construct
  REGION 1..22: note = ATaRI peptide
PQDGQGCVGEFLDFFPTCFTCP

SEQ ID NO: 4957 - protein, 12 aa, synthetic construct
  REGION 1..12: note = ATaRI peptide
QCRSRTSTGKSQ

SEQ ID NO: 4958 - protein, 57 aa, synthetic construct
  REGION 1..57: note = ATaRI peptide
ALCPLKDSGEPISNSFCRRPLGTSSSHLLCSLTFLFCIFAFTPDILLSSRVCVCVCV

SEQ ID NO: 4959 - protein, 36 aa, synthetic construct
  REGION 1..36: note = ATaRI peptide
SHTTDSLQVRTPFRCWSLTWLITVWGHGQDHGLSCQ

SEQ ID NO: 4960 - protein, 48 aa, synthetic construct
  REGION 1..48: note = ATaRI peptide
CDLYECKPGMHELCLSSLVPLHQRVADPSSATPGLSFHTKMGLLTGVL

SEQ ID NO: 4961 - protein, 45 aa, synthetic construct
  REGION 1..45: note = ATaRI peptide
SGQALGKSGKSHVEINRYSLPPNCDLWIRTKADALIFIYTEIITT

SEQ ID NO: 4962 - protein, 10 aa, synthetic construct
  REGION 1..10: note = ATaRI peptide
PIPLNIKTGT

SEQ ID NO: 4963 - protein, 19 aa, synthetic construct
  REGION 1..19: note = ATaRI peptide
TLVGDILRVGNKRMSSSLI

SEQ ID NO: 4964 - protein, 19 aa, synthetic construct
  REGION 1..19: note = ATaRI peptide
VLPVHKFQVLRGEKSHVYN

SEQ ID NO: 4965 - protein, 44 aa, synthetic construct
  REGION 1..44: note = ATaRI peptide
TPAEAFIQVRICFFKFLLLLTESSKSYFLSYYFRVLEFLYRKSC

SEQ ID NO: 4966 - protein, 73 aa, synthetic construct
  REGION 1..73: note = ATaRI peptide
PWREISGEGKKKKKKKKKKILAMCFKPKHLSHPKSVCLLQLIFLVHLPFIFQIQLVTSFLSTLLFILLSVSSV

SEQ ID NO: 4967 - protein, 17 aa, synthetic construct
  REGION 1..17: note = ATaRI peptide
ASAEPFPQVRYSPEPFK

SEQ ID NO: 4968 - protein, 10 aa, synthetic construct
  REGION 1..10: note = ATaRI peptide
ITKFMVTQVF

SEQ ID NO: 4969 - protein, 18 aa, synthetic construct
  REGION 1..18: note = ATaRI peptide
RNEVAILQVKIKNKKLVY

SEQ ID NO: 4970 - protein, 28 aa, synthetic construct
  REGION 1..28: note = ATaRI peptide
SYFNLAGQVSELVSSFLLRALWNVLGCG

SEQ ID NO: 4971 - protein, 17 aa, synthetic construct
  REGION 1..17: note = ATaRI peptide
MDQEQSLQVHCQAVFGC

SEQ ID NO: 4972 - protein, 41 aa, synthetic construct
  REGION 1..41: note = ATaRI peptide
GCGTPTCCRYEGGDAGVTVLAGSAQDLVNLAGREPLDLECQ

SEQ ID NO: 4973 - protein, 9 aa, synthetic construct
  REGION 1..9: note = ATaRI peptide
PKVTKTADK

SEQ ID NO: 4974 - protein, 14 aa, synthetic construct
  REGION 1..14: note = ATaRI peptide
PEKLKLEWAYPSLP

SEQ ID NO: 4975 - protein, 52 aa, synthetic construct
  REGION 1..52: note = ATaRI peptide
LGHTDCVKWLVSFNIGSFLFFQALILYFLNLGFIESDFLWKAQNVKILWVIC

SEQ ID NO: 4976 - protein, 13 aa, synthetic construct
  REGION 1..13: note = ATaRI peptide
GCLDFSKAVSNNF

SEQ ID NO: 4977 - protein, 16 aa, synthetic construct
  REGION 1..16: note = ATaRI peptide
LEWTRLVDVSEAGCDY

SEQ ID NO: 4978 - protein, 42 aa, synthetic construct
  REGION 1..42: note = ATaRI peptide
LSVMRYSIGRQIYSHLPSMAFTALHCNCIVLLLIRLTTFFSL

SEQ ID NO: 4979 - protein, 12 aa, synthetic construct
  REGION 1..12: note = ATaRI peptide
SGDYEILYCKYE

SEQ ID NO: 4980 - protein, 33 aa, synthetic construct
  REGION 1..33: note = ATaRI peptide
CVLGFQVFGKEMTPDVKKWFVGFLYIIFTCLNL

SEQ ID NO: 4981 - protein, 12 aa, synthetic construct
  REGION 1..12: note = ATaRI peptide
QYPCSKAKVNSL

SEQ ID NO: 4982 - protein, 15 aa, synthetic construct
  REGION 1..15: note = ATaRI peptide
IMLADKHASKLFFSD

SEQ ID NO: 4983 - protein, 24 aa, synthetic construct
  REGION 1..24: note = ATaRI peptide
VLSYLDKEVIHNHSCFVFFSLYFT

SEQ ID NO: 4984 - protein, 63 aa, synthetic construct
  REGION 1..63: note = ATaRI peptide
TTDRYVQQVIFFILLPIWLHLSELSVYILIFFGDVLLLNLFTLLFPDYFKLHDFISLGYYLRF

SEQ ID NO: 4985 - protein, 50 aa, synthetic construct
  REGION 1..50: note = ATaRI peptide
GRACESCYGKFSLAGQLSIGNCSGSWGVSVWEVPEVSTVHLGRHKHVSSK

SEQ ID NO: 4986 - protein, 10 aa, synthetic construct
  REGION 1..10: note = ATaRI peptide
LSPSPTTEVQ

SEQ ID NO: 4987 - protein, 31 aa, synthetic construct
  REGION 1..31: note = ATaRI peptide
LACIIGYLGGYFLIEEKLKEQFLNSIDIWQF

SEQ ID NO: 4988 - protein, 42 aa, synthetic construct
  REGION 1..42: note = ATaRI peptide
LACSEAVKVSIAGSFPGSRVMCLGQRISEHLIPSQQTTPLPS

SEQ ID NO: 4989 - protein, 186 aa, synthetic construct
  REGION 1..186: note = ATaRI peptide
YDVDFLCKVGQGAGPAGSSRCSSWTLPLSPGSGGRPSRPAFQVGKVPGFAKECPSALEAGRAARRAPVSRLSFSTADRGHAARGFPDRLRAAHLGSRGGGSRVETQRGPRWASSPLPLRPARSCWFCACIGGGWRPSRDPPRVGEKKEKNQAGSSSAARPESVFPFRFSSLPRSPPFGRQRNPWPT

SEQ ID NO: 4990 - protein, 9 aa, synthetic construct
  REGION 1..9: note = ATaRI peptide
TAGAHDHAW

SEQ ID NO: 4991 - protein, 9 aa, synthetic construct
  REGION 1..9: note = ATaRI peptide
TIILRCLDR

SEQ ID NO: 4992 - protein, 12 aa, synthetic construct
  REGION 1..12: note = ATaRI peptide
RRAKGHNTVSVF

SEQ ID NO: 4993 - protein, 9 aa, synthetic construct
  REGION 1..9: note = ATaRI peptide
IPITGDTLR

SEQ ID NO: 4994 - protein, 23 aa, synthetic construct
  REGION 1..23: note = ATaRI peptide
YEKLFPPKVHISNFFKSKTFSTV

SEQ ID NO: 4995 - protein, 17 aa, synthetic construct
  REGION 1..17: note = ATaRI peptide
LVRAVTLEVSTLCLYCL

SEQ ID NO: 4996 - protein, 9 aa, synthetic construct
  REGION 1..9: note = ATaRI peptide
WILAYCHVR

SEQ ID NO: 4997 - protein, 9 aa, synthetic construct
  REGION 1..9: note = ATaRI peptide
CPEYSISLR

SEQ ID NO: 4998 - protein, 67 aa, synthetic construct
  REGION 1..67: note = ATaRI peptide
KKQETPDQVSVGDTEILGFFTASPSLHCLFCGSQENLLCLRPCHFIVLIKKQRELSTVFWHETPSAG

SEQ ID NO: 4999 - protein, 16 aa, synthetic construct
  REGION 1..16: note = ATaRI peptide
APTSPCDQGETLRFAS

SEQ ID NO: 5000 - protein, 84 aa, synthetic construct
  REGION 1..84: note = ATaRI peptide
EAVSILKAVSHCPSPMAVLSWAPPPTHTHTHTHTHTHTHTPFSLSLSSFLPPTSAHHHGMGRIKGSCHWEFRHSAEDCCQENGA

SEQ ID NO: 5001 - protein, 9 aa, synthetic construct
  REGION 1..9: note = ATaRI peptide
IMCVNYVLR

SEQ ID NO: 5002 - protein, 51 aa, synthetic construct
  REGION 1..51: note = ATaRI peptide
SSSSSCSTVSSPLMARTQRGLRMYDCCQMAEGTFGTGTVLLRLSQSPLEWP

SEQ ID NO: 5003 - protein, 32 aa, synthetic construct
  REGION 1..32: note = ATaRI peptide
ILNHGRLSVSRQPSSLRPPLLVCLASHLSSPP

SEQ ID NO: 5004 - protein, 9 aa, synthetic construct
  REGION 1..9: note = ATaRI peptide
KPHLYEGDK

SEQ ID NO: 5005 - protein, 25 aa, synthetic construct
  REGION 1..25: note = ATaRI peptide
TYSLQATDGECQAPGGLYLGMAQAS

SEQ ID NO: 5006 - protein, 9 aa, synthetic construct
  REGION 1..9: note = ATaRI peptide
RKALQTLER

SEQ ID NO: 5007 - protein, 38 aa, synthetic construct
  REGION 1..38: note = ATaRI peptide
TMLYQVKKGMYYWSTLNSELGNGKLTTLEIISNCLILS

SEQ ID NO: 5008 - protein, 16 aa, synthetic construct
  REGION 1..16: note = ATaRI peptide
KKCYLEREVCQFVFIV

SEQ ID NO: 5009 - protein, 16 aa, synthetic construct
  REGION 1..16: note = ATaRI peptide
QANSAALKVGNRIFVL

SEQ ID NO: 5010 - protein, 25 aa, synthetic construct
  REGION 1..25: note = ATaRI peptide
ENERLHIQVRKSVFLCELKNGSVIC

SEQ ID NO: 5011 - protein, 13 aa, synthetic construct
  REGION 1..13: note = ATaRI peptide
ECRLRTEEWYVET

SEQ ID NO: 5012 - protein, 9 aa, synthetic construct
  REGION 1..9: note = ATaRI peptide
QKQNSVIFG

SEQ ID NO: 5013 - protein, 11 aa, synthetic construct
  REGION 1..11: note = ATaRI peptide
HGFHDVMKGRP

SEQ ID NO: 5014 - protein, 35 aa, synthetic construct
  REGION 1..35: note = ATaRI peptide
ALTNGAGKVILFWRILMLKLLNMCFFSEGHRKMDL

SEQ ID NO: 5015 - protein, 13 aa, synthetic construct
  REGION 1..13: note = ATaRI peptide
FIKSTICLSKSSK

SEQ ID NO: 5016 - protein, 26 aa, synthetic construct
  REGION 1..26: note = ATaRI peptide
NRDVEDEIVSRPLLHTWLFHEPPCLC

SEQ ID NO: 5017 - protein, 69 aa, synthetic construct
  REGION 1..69: note = ATaRI peptide
RKHYASEEVGCYFALELQLASRCKMTLFYMFVCVRDTVFTFLYTHTYVLKLLSCASRIMQLCKTLGPGW

SEQ ID NO: 5018 - protein, 37 aa, synthetic construct
  REGION 1..37: note = ATaRI peptide
ILVACVPLGELSTLRYTKNWRGGAGPFLEQMRRIDMA

SEQ ID NO: 5019 - protein, 14 aa, synthetic construct
  REGION 1..14: note = ATaRI peptide
EHFAHPPSGKVEVY

SEQ ID NO: 5020 - protein, 45 aa, synthetic construct
  REGION 1..45: note = ATaRI peptide
GKPTGEVEVWLALICQDLQIWWWNYQNQNMCKKASNKFCLQTHSY

SEQ ID NO: 5021 - protein, 56 aa, synthetic construct
  REGION 1..56: note = ATaRI peptide
DARHVVKVVSVAHRFVFHIYLTFSFSALRMFFTLIFVTIALSVNLMLSSVLTLLKH

SEQ ID NO: 5022 - protein, 10 aa, synthetic construct
  REGION 1..10: note = ATaRI peptide
QRVAKKDCSK

SEQ ID NO: 5023 - protein, 9 aa, synthetic construct
  REGION 1..9: note = ATaRI peptide
GLTEFKGRR

SEQ ID NO: 5024 - protein, 38 aa, synthetic construct
  REGION 1..38: note = ATaRI peptide
VLQLGIRMVRITYFACSISKLFTSCNIEIFSLCGIIRE

SEQ ID NO: 5025 - protein, 23 aa, synthetic construct
  REGION 1..23: note = ATaRI peptide
LMNNEAAQVRGLFVCVFSNLMLH

SEQ ID NO: 5026 - protein, 20 aa, synthetic construct
  REGION 1..20: note = ATaRI peptide
FHQICLYEVKNKNIVKTFFR

SEQ ID NO: 5027 - protein, 11 aa, synthetic construct
  REGION 1..11: note = ATaRI peptide
KFEFDGIEVSV

SEQ ID NO: 5028 - protein, 63 aa, synthetic construct
  REGION 1..63: note = ATaRI peptide
NLPVWDPRVCDLLWSFFKAFKEEDISLNYSLVKDSSSCLCSSFYITIVPFLLLLWFLFCFLCR

SEQ ID NO: 5029 - protein, 9 aa, synthetic construct
  REGION 1..9: note = ATaRI peptide
STEENHLEW

SEQ ID NO: 5030 - protein, 63 aa, synthetic construct
  REGION 1..63: note = ATaRI peptide
NRTYPSIQVIDPSSVSISLLVASYTSYSNYFKGPVSSQSSPQVYLFLFSFFFLNGSVKKTSIR

SEQ ID NO: 5031 - protein, 17 aa, synthetic construct
  REGION 1..17: note = ATaRI peptide
VSNPIYDNRKYFIFLYL

SEQ ID NO: 5032 - protein, 10 aa, synthetic construct
  REGION 1..10: note = ATaRI peptide
IEFLNDIKVV

SEQ ID NO: 5033 - protein, 12 aa, synthetic construct
  REGION 1..12: note = ATaRI peptide
DMLNLALKGNKL

SEQ ID NO: 5034 - protein, 13 aa, synthetic construct
  REGION 1..13: note = ATaRI peptide
GHDAVSKTGKVLN

SEQ ID NO: 5035 - protein, 9 aa, synthetic construct
  REGION 1..9: note = ATaRI peptide
KDKKDKFKR

SEQ ID NO: 5036 - protein, 15 aa, synthetic construct
  REGION 1..15: note = ATaRI peptide
FDPTQLTKVNFEYCP

SEQ ID NO: 5037 - protein, 9 aa, synthetic construct
  REGION 1..9: note = ATaRI peptide
VPFSKDTVR

SEQ ID NO: 5038 - protein, 21 aa, synthetic construct
  REGION 1..21: note = ATaRI peptide
PKTGELNAVSSFFSLILYLHK

SEQ ID NO: 5039 - protein, 9 aa, synthetic construct
  REGION 1..9: note = ATaRI peptide
LHHFRPDLM

SEQ ID NO: 5040 - protein, 9 aa, synthetic construct
  REGION 1..9: note = ATaRI peptide
TREALPESG

SEQ ID NO: 5041 - protein, 9 aa, synthetic construct
  REGION 1..9: note = ATaRI peptide
VEKTSTSTR

SEQ ID NO: 5042 - protein, 21 aa, synthetic construct
  REGION 1..21: note = ATaRI peptide
KVGNIEIKVIFYLLINDNQDM

SEQ ID NO: 5043 - protein, 12 aa, synthetic construct
  REGION 1..12: note = ATaRI peptide
AWLFQHLTVSGF

SEQ ID NO: 5044 - protein, 13 aa, synthetic construct
  REGION 1..13: note = ATaRI peptide
ESLKQSSKGMYEI

SEQ ID NO: 5045 - protein, 59 aa, synthetic construct
  REGION 1..59: note = ATaRI peptide
IGRGPLLGVSVGGGLADPESRGVPRRLLKTGPSPGRFPHRTGPPVRILEVWGRTFFSYL

SEQ ID NO: 5046 - protein, 38 aa, synthetic construct
  REGION 1..38: note = ATaRI peptide
GGQLRIKPVNMLLMIHFNFHLLPFQFPSRGAYFLRLWE

SEQ ID NO: 5047 - protein, 9 aa, synthetic construct
  REGION 1..9: note = ATaRI peptide
EVEMQCTLR

SEQ ID NO: 5048 - protein, 25 aa, synthetic construct
  REGION 1..25: note = ATaRI peptide
SVPAISGGRFLFLLMLTLKETLNRI

SEQ ID NO: 5049 - protein, 9 aa, synthetic construct
  REGION 1..9: note = ATaRI peptide
CMYGANCYR

SEQ ID NO: 5050 - protein, 12 aa, synthetic construct
  REGION 1..12: note = ATaRI peptide
CPYGPSCYRYRN

SEQ ID NO: 5051 - protein, 16 aa, synthetic construct
  REGION 1..16: note = ATaRI peptide
ALNPVRWKVSTQGRFC

SEQ ID NO: 5052 - protein, 10 aa, synthetic construct
  REGION 1..10: note = ATaRI peptide
LVPESNQKVV

SEQ ID NO: 5053 - protein, 46 aa, synthetic construct
  REGION 1..46: note = ATaRI peptide
LFFYSEREVSNGLAVSKHIHGTGLLLSKMGHTLSIHVIGVLCKSPE

SEQ ID NO: 5054 - protein, 16 aa, synthetic construct
  REGION 1..16: note = ATaRI peptide
VIITTTHCVSHNLSLY

SEQ ID NO: 5055 - protein, 29 aa, synthetic construct
  REGION 1..29: note = ATaRI peptide
FWPLCCTVVSAPNLRPCKVKGDIKFTDHE

SEQ ID NO: 5056 - protein, 55 aa, synthetic construct
  REGION 1..55: note = ATaRI peptide
MRPQPGDTVGLVNSLMVSLSLSLTYTHTHTHTHIFFFSLHLCRAKITLDSKTELE

SEQ ID NO: 5057 - protein, 41 aa, synthetic construct
  REGION 1..41: note = ATaRI peptide
QELRRAMKVCALPLVLLVLLVQTLMCFLKKLSPNKKDMEAT

SEQ ID NO: 5058 - protein, 14 aa, synthetic construct
  REGION 1..14: note = ATaRI peptide
LHKIYLCQVSIFSI

SEQ ID NO: 5059 - protein, 9 aa, synthetic construct
  REGION 1..9: note = ATaRI peptide
YGLDSVKKK

SEQ ID NO: 5060 - protein, 11 aa, synthetic construct
  REGION 1..11: note = ATaRI peptide
DIYTALKKVLT

SEQ ID NO: 5061 - protein, 9 aa, synthetic construct
  REGION 1..9: note = ATaRI peptide
RAEQDSEVG

SEQ ID NO: 5062 - protein, 9 aa, synthetic construct
  REGION 1..9: note = ATaRI peptide
QPRRSIAFR

SEQ ID NO: 5063 - protein, 37 aa, synthetic construct
  REGION 1..37: note = ATaRI peptide
VAAALHGGVSPVAIRRIWGSVGGLSLLFYFVLFLVAA

SEQ ID NO: 5064 - protein, 100 aa, synthetic construct
  REGION 1..100: note = ATaRI peptide
DYLERRERGARGRGGVHSKRGRGSCGAGLRSGRPAAPGVVGGGETASAPNPSGSPHARSEGKPPLPQSNEWGGEGAAARRGPERRPFPSPSRVGGRGPLR

SEQ ID NO: 5065 - protein, 37 aa, synthetic construct
  REGION 1..37: note = ATaRI peptide
TKAKLHIKVSVLLGCCFIFTCSVRVCLLLHLQDSPLP

SEQ ID NO: 5066 - protein, 16 aa, synthetic construct
  REGION 1..16: note = ATaRI peptide
SFEKRQEKVISNLRNF

SEQ ID NO: 5067 - protein, 21 aa, synthetic construct
  REGION 1..21: note = ATaRI peptide
NFHFIPKPVSVLTVQCVARAG

SEQ ID NO: 5068 - protein, 63 aa, synthetic construct
  REGION 1..63: note = ATaRI peptide
PDNISILKVRRMRQTLSQMSVRGFVPVSHWLELTTGCLLEIVGKQIFSFFFAIVIKANKGKGN

SEQ ID NO: 5069 - protein, 15 aa, synthetic construct
  REGION 1..15: note = ATaRI peptide
SRRSVRSSGTLMAMK

SEQ ID NO: 5070 - protein, 27 aa, synthetic construct
  REGION 1..27: note = ATaRI peptide
LIVPYRKEVSHLVCGKNSYKVIALMIL

SEQ ID NO: 5071 - protein, 65 aa, synthetic construct
  REGION 1..65: note = ATaRI peptide
LFLALLSGVSYNSRRILFMLSLPLQPVPATLYWAHLLDPPFLRPVTWAGTPFPASNNVNCLARRD

SEQ ID NO: 5072 - protein, 66 aa, synthetic construct
  REGION 1..66: note = ATaRI peptide
SNKPVTIPGKLEMWSFSALFSFLFFNFLSSGVHVQVSYIGKRVMGVCCTGYFITQILSLGPISYFS

SEQ ID NO: 5073 - protein, 23 aa, synthetic construct
  REGION 1..23: note = ATaRI peptide
TENEPLNKVSFHVLFISLKLKTF

SEQ ID NO: 5074 - protein, 19 aa, synthetic construct
  REGION 1..19: note = ATaRI peptide
ENMNIKDEVNQTTIFTSSY

SEQ ID NO: 5075 - protein, 35 aa, synthetic construct
  REGION 1..35: note = ATaRI peptide
GRSSKSKEVKNRSQTLTLLFHLHSTVHLSYNLCLP

SEQ ID NO: 5076 - protein, 83 aa, synthetic construct
  REGION 1..83: note = ATaRI peptide
SDKPQDFQVMNGLSLTPGSSSAISCGCQAPAWFVQLQGKMCVGSSGPSCGGICSFPGPGQMPNREFTSYIHRISFCRDLWFCA

SEQ ID NO: 5077 - protein, 47 aa, synthetic construct
  REGION 1..47: note = ATaRI peptide
GNSPLFNEVGDMGHEGQNLGGPSNLEAQCRHLAIHSRVFTYGADLGW

SEQ ID NO: 5078 - protein, 14 aa, synthetic construct
  REGION 1..14: note = ATaRI peptide
DALLGEFRVIAYFL

SEQ ID NO: 5079 - protein, 43 aa, synthetic construct
  REGION 1..43: note = ATaRI peptide
VGTIYREPREFSPLWPYPCILVLEADWGHSFGVLTVPPGGFRI

SEQ ID NO: 5080 - protein, 55 aa, synthetic construct
  REGION 1..55: note = ATaRI peptide
FRAEDLPQSAWGAPLGGRSAGGWRRRAGGGGRWRAGSAPWGKERRLGKQSEFNEK

SEQ ID NO: 5081 - protein, 74 aa, synthetic construct
  REGION 1..74: note = ATaRI peptide
VKPSKASDCTLLSPWGQPGEWGLGFWLEGRGCWRHGVFDLPEVGLRFPHKGKSLDLPLLSPLGLCGACKSSGML

SEQ ID NO: 5082 - protein, 23 aa, synthetic construct
  REGION 1..23: note = ATaRI peptide
KLQTIFLKVSFLFSQVMIVFFPT

SEQ ID NO: 5083 - protein, 9 aa, synthetic construct
  REGION 1..9: note = ATaRI peptide
DWFVCPEKT

SEQ ID NO: 5084 - protein, 15 aa, synthetic construct
  REGION 1..15: note = ATaRI peptide
PSVIGEFKVNPRRRP

SEQ ID NO: 5085 - protein, 19 aa, synthetic construct
  REGION 1..19: note = ATaRI peptide
QPKDPNGKVTFLEPSPPPE

SEQ ID NO: 5086 - protein, 34 aa, synthetic construct
  REGION 1..34: note = ATaRI peptide
KEYSIEEIGELPHDPKPWWALAVSLPLSSDPLLP

SEQ ID NO: 5087 - protein, 11 aa, synthetic construct
  REGION 1..11: note = ATaRI peptide
PLQPDIEQVGP

SEQ ID NO: 5088 - protein, 84 aa, synthetic construct
  REGION 1..84: note = ATaRI peptide
EGEKKILAVSLLPPAPVEGMGEASSIEIVRKYVIRKYMLTVPPPFSPSPAPIPPLSLFSKAFSLFPPNSRSPSPLRLTSQGKPI

SEQ ID NO: 5089 - protein, 14 aa, synthetic construct
  REGION 1..14: note = ATaRI peptide
MNPKLEDPRSVPSP

SEQ ID NO: 5090 - protein, 23 aa, synthetic construct
  REGION 1..23: note = ATaRI peptide
KLLGDKFKVIILPWPVSFPPQIS

SEQ ID NO: 5091 - protein, 10 aa, synthetic construct
  REGION 1..10: note = ATaRI peptide
ESLQKDTAGS

SEQ ID NO: 5092 - protein, 21 aa, synthetic construct
  REGION 1..21: note = ATaRI peptide
SRRCGLNDEYVAEGFRARAHL

SEQ ID NO: 5093 - protein, 32 aa, synthetic construct
  REGION 1..32: note = ATaRI peptide
LAGDNPKEVSRAGRGPCLPSFLAWRPSWSSGR

SEQ ID NO: 5094 - protein, 38 aa, synthetic construct
  REGION 1..38: note = ATaRI peptide
FDPKCGVIVSDGVGGEGEGACTSVSYLGWWWEDGKGFL

SEQ ID NO: 5095 - protein, 55 aa, synthetic construct
  REGION 1..55: note = ATaRI peptide
QRSAAVMAGEWGETRTCNFLLIASFPTLAVRISVFFLTLECLLFSCLFLAFPVLP

SEQ ID NO: 5096 - protein, 9 aa, synthetic construct
  REGION 1..9: note = ATaRI peptide
VAHAGEHRG

SEQ ID NO: 5097 - protein, 9 aa, synthetic construct
  REGION 1..9: note = ATaRI peptide
TKDISDIEG

SEQ ID NO: 5098 - protein, 9 aa, synthetic construct
  REGION 1..9: note = ATaRI peptide
GSVYKKHPQ

SEQ ID NO: 5099 - protein, 36 aa, synthetic construct
  REGION 1..36: note = ATaRI peptide
CQQNSLDEVTAPSWRALLWALLTLNKTSQVWSRGES

SEQ ID NO: 5100 - protein, 16 aa, synthetic construct
  REGION 1..16: note = ATaRI peptide
KEAIHRREVGDTWHEV

SEQ ID NO: 5101 - protein, 9 aa, synthetic construct
  REGION 1..9: note = ATaRI peptide
QDAVKKMQV

SEQ ID NO: 5102 - protein, 9 aa, synthetic construct
  REGION 1..9: note = ATaRI peptide
IEYDTYNLK

SEQ ID NO: 5103 - protein, 33 aa, synthetic construct
  REGION 1..33: note = ATaRI peptide
KNLFIVNPVCIYHLYFKIITYKKRKCESIKLLV

SEQ ID NO: 5104 - protein, 12 aa, synthetic construct
  REGION 1..12: note = ATaRI peptide
HTIISQIKVCLL

SEQ ID NO: 5105 - protein, 16 aa, synthetic construct
  REGION 1..16: note = ATaRI peptide
QALKLQEPGNLSICTY

SEQ ID NO: 5106 - protein, 12 aa, synthetic construct
  REGION 1..12: note = ATaRI peptide
PSPLRCLEVTIN

SEQ ID NO: 5107 - protein, 9 aa, synthetic construct
  REGION 1..9: note = ATaRI peptide
QNSQFLLTR

SEQ ID NO: 5108 - protein, 33 aa, synthetic construct
  REGION 1..33: note = ATaRI peptide
VLAFRGIPVCITHNLVPSARAFVVCYCVVPELW

SEQ ID NO: 5109 - protein, 18 aa, synthetic construct
  REGION 1..18: note = ATaRI peptide
VDTIQPETGNCTNAAVSP

SEQ ID NO: 5110 - protein, 30 aa, synthetic construct
  REGION 1..30: note = ATaRI peptide
SEPEREVRGARGRAGLGARACFFRVLFSCL

SEQ ID NO: 5111 - protein, 10 aa, synthetic construct
  REGION 1..10: note = ATaRI peptide
LVCGKYFQGK

SEQ ID NO: 5112 - protein, 15 aa, synthetic construct
  REGION 1..15: note = ATaRI peptide
DYANAVLQVRSRREH

SEQ ID NO: 5113 - protein, 32 aa, synthetic construct
  REGION 1..32: note = ATaRI peptide
KTFQITKQGKNKSFMFQDNKTSLMNKFISTWQ

SEQ ID NO: 5114 - protein, 35 aa, synthetic construct
  REGION 1..35: note = ATaRI peptide
GGTKKKKKSKSFTYKKELFCSLLKNFAVGRNGSCL

SEQ ID NO: 5115 - protein, 10 aa, synthetic construct
  REGION 1..10: note = ATaRI peptide
KKLPHPDLVS

SEQ ID NO: 5116 - protein, 9 aa, synthetic construct
  REGION 1..9: note = ATaRI peptide
PTIVNFPIT

SEQ ID NO: 5117 - protein, 14 aa, synthetic construct
  REGION 1..14: note = ATaRI peptide
TLSEAYIQVGWPQA

SEQ ID NO: 5118 - protein, 19 aa, synthetic construct
  REGION 1..19: note = ATaRI peptide
LRLCIPSTGECRGDSRDTS

SEQ ID NO: 5119 - protein, 21 aa, synthetic construct
  REGION 1..21: note = ATaRI peptide
DIAEPHIPVRRGSYIIYIILF

SEQ ID NO: 5120 - protein, 85 aa, synthetic construct
  REGION 1..85: note = ATaRI peptide
QTGQSEALVITVGLDFFFSLSFFLKKLLLKIRWVVLPCVRVVEICTEMCGTIALIKSGIGGREILNSYFCPSLLFNNMLSSPTSY

SEQ ID NO: 5121 - protein, 14 aa, synthetic construct
  REGION 1..14: note = ATaRI peptide
GHQFGVTWRYVTRN

SEQ ID NO: 5122 - protein, 48 aa, synthetic construct
  REGION 1..48: note = ATaRI peptide
ELLNNRLHGEFENSPLSLSPFPSFNCLCEGFGSCLSHWPTLYLFLRRR

SEQ ID NO: 5123 - protein, 17 aa, synthetic construct
  REGION 1..17: note = ATaRI peptide
EEKWSKILVRRNPQFIF

SEQ ID NO: 5124 - protein, 70 aa, synthetic construct
  REGION 1..70: note = ATaRI peptide
EVIPKIWKGQFYFLCVQVHLTSISSTLIMNVLTLLLGMKTSILTEPNVLVEMYFKVMCSCCMLAIRRKFC

SEQ ID NO: 5125 - protein, 21 aa, synthetic construct
  REGION 1..21: note = ATaRI peptide
ARDKHPPEVGLKLTSQYILPY

SEQ ID NO: 5126 - protein, 9 aa, synthetic construct
  REGION 1..9: note = ATaRI peptide
DFAINQEQK

SEQ ID NO: 5127 - protein, 15 aa, synthetic construct
  REGION 1..15: note = ATaRI peptide
RIVQWPAIVSKTWAY

SEQ ID NO: 5128 - protein, 9 aa, synthetic construct
  REGION 1..9: note = ATaRI peptide
NLGAKIPQG

SEQ ID NO: 5129 - protein, 69 aa, synthetic construct
  REGION 1..69: note = ATaRI peptide
GNVNKENKGECFLLLCLFLSILVHSWKDLREQWLEVVWNGKCFSGVILEPATNESVFEMQHQRGEILLH

SEQ ID NO: 5130 - protein, 35 aa, synthetic construct
  REGION 1..35: note = ATaRI peptide
DVAEELCQVTVCQLGGYEKETRELLGVYSICRVGF

SEQ ID NO: 5131 - protein, 9 aa, synthetic construct
  REGION 1..9: note = ATaRI peptide
LNKMFNGSK

SEQ ID NO: 5132 - protein, 39 aa, synthetic construct
  REGION 1..39: note = ATaRI peptide
LLPKDELNGECSHLYFHSSSPCQLSLQNCKSITKPLGSL

SEQ ID NO: 5133 - protein, 37 aa, synthetic construct
  REGION 1..37: note = ATaRI peptide
SDLDRHPEVRLPLRGRPLRISFRFFMAVTCSWAPDIL

SEQ ID NO: 5134 - protein, 21 aa, synthetic construct
  REGION 1..21: note = ATaRI peptide
RFIVIADFRYSFWCLSCQLRR

SEQ ID NO: 5135 - protein, 9 aa, synthetic construct
  REGION 1..9: note = ATaRI peptide
GDLKGVKGV

SEQ ID NO: 5136 - protein, 28 aa, synthetic construct
  REGION 1..28: note = ATaRI peptide
ALQVEQKEVRGFNFERLQFSPHSWRLWV

SEQ ID NO: 5137 - protein, 9 aa, synthetic construct
  REGION 1..9: note = ATaRI peptide
VKPNPGSDM

SEQ ID NO: 5138 - protein, 29 aa, synthetic construct
  REGION 1..29: note = ATaRI peptide
DDMDEKLQVCARLLTIKSFDQLHPEQCGS

SEQ ID NO: 5139 - protein, 20 aa, synthetic construct
  REGION 1..20: note = ATaRI peptide
GEEDQEWWVSQGWAWEVPGG

SEQ ID NO: 5140 - protein, 9 aa, synthetic construct
  REGION 1..9: note = ATaRI peptide
LLSDYVKVR

SEQ ID NO: 5141 - protein, 31 aa, synthetic construct
  REGION 1..31: note = ATaRI peptide
MIEIAGVKVPSGCGAFLPREISTELCATKYY

SEQ ID NO: 5142 - protein, 32 aa, synthetic construct
  REGION 1..32: note = ATaRI peptide
IKPDILIIVSINILYCNQCNVSRFFFFWKIIL

SEQ ID NO: 5143 - protein, 34 aa, synthetic construct
  REGION 1..34: note = ATaRI peptide
CVEGTLAKVSYSHRLLCYSYSESRRWHGPHRFLH

SEQ ID NO: 5144 - protein, 11 aa, synthetic construct
  REGION 1..11: note = ATaRI peptide
RALKPPHVVSL

SEQ ID NO: 5145 - protein, 29 aa, synthetic construct
  REGION 1..29: note = ATaRI peptide
FRGEKLAKVKGYGSCLSNPCFFFRKDCTS

SEQ ID NO: 5146 - protein, 97 aa, synthetic construct
  REGION 1..97: note = ATaRI peptide
QSNPKIRKGKSSFLSFFFFFFFFFWRRILALSSRLECSGTISAHCILHFPGSSNSPASASQGVGIIDACHHTQLIFVFLVEVGFHCVGQAGLELLTS

SEQ ID NO: 5147 - protein, 20 aa, synthetic construct
  REGION 1..20: note = ATaRI peptide
WEEQCIIQGKQTTANLGKSG

SEQ ID NO: 5148 - protein, 22 aa, synthetic construct
  REGION 1..22: note = ATaRI peptide
NYNSIVSLGKGSLHEEVQSVLC

SEQ ID NO: 5149 - protein, 45 aa, synthetic construct
  REGION 1..45: note = ATaRI peptide
VLLTPGSQVSLDFFFLFLLFSEQGCLSFQCLWNCSALMLRPLGSS

SEQ ID NO: 5150 - protein, 16 aa, synthetic construct
  REGION 1..16: note = ATaRI peptide
VSKAASQKRECWKQCK

SEQ ID NO: 5151 - protein, 23 aa, synthetic construct
  REGION 1..23: note = ATaRI peptide
LVTKDSVAGRSLVPAPLYLPLHR

SEQ ID NO: 5152 - protein, 9 aa, synthetic construct
  REGION 1..9: note = ATaRI peptide
SRTIYDIAW

SEQ ID NO: 5153 - protein, 33 aa, synthetic construct
  REGION 1..33: note = ATaRI peptide
MALTSVPSGELLGMVFAALWPPCSWGAMDRHQN

SEQ ID NO: 5154 - protein, 20 aa, synthetic construct
  REGION 1..20: note = ATaRI peptide
NEFSLESEVEYSLVKLIFSL

SEQ ID NO: 5155 - protein, 17 aa, synthetic construct
  REGION 1..17: note = ATaRI peptide
ISPRSIKDGKLFEGCLL

SEQ ID NO: 5156 - protein, 59 aa, synthetic construct
  REGION 1..59: note = ATaRI peptide
MDSLTSSEGKFAATNFVLENVDENIENAHSFLIPTFYPSEMEGFDVNMLMFLLISLFIK

SEQ ID NO: 5157 - protein, 15 aa, synthetic construct
  REGION 1..15: note = ATaRI peptide
KEGPISGTGNFAKHI

SEQ ID NO: 5158 - protein, 15 aa, synthetic construct
  REGION 1..15: note = ATaRI peptide
KKGQQSGTGNFAKHI

SEQ ID NO: 5159 - protein, 15 aa, synthetic construct
  REGION 1..15: note = ATaRI peptide
KDGLQCGTGNFAKHI

SEQ ID NO: 5160 - protein, 22 aa, synthetic construct
  REGION 1..22: note = ATaRI peptide
KDGEKSGTGNFAKHIQCHVQSR

SEQ ID NO: 5161 - protein, 23 aa, synthetic construct
  REGION 1..23: note = ATaRI peptide
KDGEKSRTGNFEKRFNVMFSADR

SEQ ID NO: 5162 - protein, 15 aa, synthetic construct
  REGION 1..15: note = ATaRI peptide
KDGEISRKGNFAKHI

SEQ ID NO: 5163 - protein, 23 aa, synthetic construct
  REGION 1..23: note = ATaRI peptide
KDGEKSRTGNSENRFNVMFSPDR

SEQ ID NO: 5164 - protein, 31 aa, synthetic construct
  REGION 1..31: note = ATaRI peptide
EYENNQPQVCKNLKSNFWFNLVFLALVIQHI

SEQ ID NO: 5165 - protein, 10 aa, synthetic construct
  REGION 1..10: note = ATaRI peptide
TGGNNSNQVN

SEQ ID NO: 5166 - protein, 22 aa, synthetic construct
  REGION 1..22: note = ATaRI peptide
EKEKAEREVSIKKNKYFSNFLK

SEQ ID NO: 5167 - protein, 39 aa, synthetic construct
  REGION 1..39: note = ATaRI peptide
GLKKKNNTGKFFLHMYLTFFIHIFHLHDVRTWNGILSRF

SEQ ID NO: 5168 - protein, 9 aa, synthetic construct
  REGION 1..9: note = ATaRI peptide
RHAGPLSGR

SEQ ID NO: 5169 - protein, 56 aa, synthetic construct
  REGION 1..56: note = ATaRI peptide
HHRLHLTLRLVFSFIPLKGSGIMRSRDRWGKDPLLILREHPSLPRSQSAWGHCVVY

SEQ ID NO: 5170 - protein, 77 aa, synthetic construct
  REGION 1..77: note = ATaRI peptide
LTDLHQYRGGCTPMLSPHTRAHTHTHTLSLSLSHSLCFPSQGSGTQGHLHIPTDRHFNGFLKITSYVGVNSFKYGFF

SEQ ID NO: 5171 - protein, 9 aa, synthetic construct
  REGION 1..9: note = ATaRI peptide
HKFEETKKQ

SEQ ID NO: 5172 - protein, 19 aa, synthetic construct
  REGION 1..19: note = ATaRI peptide
VDWHEEEWVSLLLWLSSHC

SEQ ID NO: 5173 - protein, 54 aa, synthetic construct
  REGION 1..54: note = ATaRI peptide
DILWQAAEVLVTERKRRLLRCPQLNVMTETLQSRISAGEQSSPYWERRESLSTF

SEQ ID NO: 5174 - protein, 9 aa, synthetic construct
  REGION 1..9: note = ATaRI peptide
FLLDDSFEW

SEQ ID NO: 5175 - protein, 21 aa, synthetic construct
  REGION 1..21: note = ATaRI peptide
KHNEKNKKGILIFYHSNSKWL

SEQ ID NO: 5176 - protein, 16 aa, synthetic construct
  REGION 1..16: note = ATaRI peptide
ASDEETEKGEYLISTH

SEQ ID NO: 5177 - protein, 10 aa, synthetic construct
  REGION 1..10: note = ATaRI peptide
PMKELRVKVC

SEQ ID NO: 5178 - protein, 17 aa, synthetic construct
  REGION 1..17: note = ATaRI peptide
EDEIPVLKVSSFKNFFP

SEQ ID NO: 5179 - protein, 9 aa, synthetic construct
  REGION 1..9: note = ATaRI peptide
KKQKQEEFK

SEQ ID NO: 5180 - protein, 9 aa, synthetic construct
  REGION 1..9: note = ATaRI peptide
DLVIKYMKR

SEQ ID NO: 5181 - protein, 12 aa, synthetic construct
  REGION 1..12: note = ATaRI peptide
DLRAKVWKVTRN

SEQ ID NO: 5182 - protein, 36 aa, synthetic construct
  REGION 1..36: note = ATaRI peptide
HKDCLQFIGKLNNHFQAELNFGNNFWVEESLFRIIL

SEQ ID NO: 5183 - protein, 14 aa, synthetic construct
  REGION 1..14: note = ATaRI peptide
SDSKEEVISKYHLM

SEQ ID NO: 5184 - protein, 9 aa, synthetic construct
  REGION 1..9: note = ATaRI peptide
KTPASFRKV

SEQ ID NO: 5185 - protein, 16 aa, synthetic construct
  REGION 1..16: note = ATaRI peptide
LQANQLQGVSKGNPVC

SEQ ID NO: 5186 - protein, 9 aa, synthetic construct
  REGION 1..9: note = ATaRI peptide
GIEILAIER

SEQ ID NO: 5187 - protein, 9 aa, synthetic construct
  REGION 1..9: note = ATaRI peptide
GHSTVVNPW

SEQ ID NO: 5188 - protein, 16 aa, synthetic construct
  REGION 1..16: note = ATaRI peptide
EAIVYSDIGKIFLGMV

SEQ ID NO: 5189 - protein, 9 aa, synthetic construct
  REGION 1..9: note = ATaRI peptide
TMGTIEVQR

SEQ ID NO: 5190 - protein, 9 aa, synthetic construct
  REGION 1..9: note = ATaRI peptide
QIPYTSFHL

SEQ ID NO: 5191 - protein, 19 aa, synthetic construct
  REGION 1..19: note = ATaRI peptide
EVSLQVAAGVFHGRDKSFQ

SEQ ID NO: 5192 - protein, 14 aa, synthetic construct
  REGION 1..14: note = ATaRI peptide
KMRMKNIGRYYNFS

SEQ ID NO: 5193 - protein, 35 aa, synthetic construct
  REGION 1..35: note = ATaRI peptide
NLAGNNLKVNGFFFVYKTILRKKNSSNVEISQIKK

SEQ ID NO: 5194 - protein, 52 aa, synthetic construct
  REGION 1..52: note = ATaRI peptide
AAESAFFQRYVLLFLGDDLKSSFPLSLSHLGDFLVFGMCFLPLSQLGPIQKR

SEQ ID NO: 5195 - protein, 40 aa, synthetic construct
  REGION 1..40: note = ATaRI peptide
TVIPRRIKGKKKNKLDDLLFFLLTGLRLCRFIYVAKTYMP

SEQ ID NO: 5196 - protein, 46 aa, synthetic construct
  REGION 1..46: note = ATaRI peptide
EYLTTFVPGWYCAFCFVTLSHISFEISRLTQVPEERLSGEETYISV

SEQ ID NO: 5197 - protein, 15 aa, synthetic construct
  REGION 1..15: note = ATaRI peptide
GQAVDDFKVTSIFLF

SEQ ID NO: 5198 - protein, 9 aa, synthetic construct
  REGION 1..9: note = ATaRI peptide
LSKDADGDT

SEQ ID NO: 5199 - protein, 24 aa, synthetic construct
  REGION 1..24: note = ATaRI peptide
LPTSSDSKVNPPLGCSPQAMSPSV

SEQ ID NO: 5200 - protein, 9 aa, synthetic construct
  REGION 1..9: note = ATaRI peptide
QAELQICLR

SEQ ID NO: 5201 - protein, 15 aa, synthetic construct
  REGION 1..15: note = ATaRI peptide
VDIFSCGIVRVSCSA

SEQ ID NO: 5202 - protein, 61 aa, synthetic construct
  REGION 1..61: note = ATaRI peptide
VGLEPPQDGKPEVRVHLDAHVCVPNFSPSFFLSVAFIHSFIWLFSHSPTSQFFTEKPGRHP

SEQ ID NO: 5203 - protein, 13 aa, synthetic construct
  REGION 1..13: note = ATaRI peptide
STIASCSQVSPGP

SEQ ID NO: 5204 - protein, 33 aa, synthetic construct
  REGION 1..33: note = ATaRI peptide
KVLHPLEGGGCEGRRTGSTFRGPVLTFFVLGIL

SEQ ID NO: 5205 - protein, 27 aa, synthetic construct
  REGION 1..27: note = ATaRI peptide
VNSLNVSASEYFISGITKVRKFEVILH

SEQ ID NO: 5206 - protein, 58 aa, synthetic construct
  REGION 1..58: note = ATaRI peptide
PQLNFGMAGELRHYFHLFFKDRAIHFGSILNNTEGGGTKFITNIKQWQRYSIFSSIGS

SEQ ID NO: 5207 - protein, 13 aa, synthetic construct
  REGION 1..13: note = ATaRI peptide
SPLFQFAEVIYYN

SEQ ID NO: 5208 - protein, 50 aa, synthetic construct
  REGION 1..50: note = ATaRI peptide
VAAMENVHRLVVEGGRRKQHGNQINLFDVICDIFYRALGFKLGSRALLVI

SEQ ID NO: 5209 - protein, 18 aa, synthetic construct
  REGION 1..18: note = ATaRI peptide
LEKSSGQLVRESLIFINC

SEQ ID NO: 5210 - protein, 16 aa, synthetic construct
  REGION 1..16: note = ATaRI peptide
NIQAGNYTVSVFFLEI

SEQ ID NO: 5211 - protein, 83 aa, synthetic construct
  REGION 1..83: note = ATaRI peptide
KYPGENDQVLYSFLKLQQHFFLYPFLFCSLPHRFFLFITSLLLFTSSFFSFSFTSFFVLSQFSLMLISLPLFIHYHHLLNSSL

SEQ ID NO: 5212 - protein, 30 aa, synthetic construct
  REGION 1..30: note = ATaRI peptide
VPGIVKILVSILFCPFFFFLLSFLGKIFLT

SEQ ID NO: 5213 - protein, 11 aa, synthetic construct
  REGION 1..11: note = ATaRI peptide
RMLSCYQQGTK

SEQ ID NO: 5214 - protein, 9 aa, synthetic construct
  REGION 1..9: note = ATaRI peptide
NKDSKEDQV

SEQ ID NO: 5215 - protein, 35 aa, synthetic construct
  REGION 1..35: note = ATaRI peptide
HILDMIEQVSMIREGACLLLLLSGFSCDSLNSITL

SEQ ID NO: 5216 - protein, 9 aa, synthetic construct
  REGION 1..9: note = ATaRI peptide
AFGINKVSK

SEQ ID NO: 5217 - protein, 52 aa, synthetic construct
  REGION 1..52: note = ATaRI peptide
LKEQLSMKRYKLSFFFGCTLSETVFHSTLSGWHIDVIYHSNRGTFEADIEQY

SEQ ID NO: 5218 - protein, 43 aa, synthetic construct
  REGION 1..43: note = ATaRI peptide
TSRALTAEVTTKRGQGYGVRGKVLLVYHHTKEFVKDCFLYKQK

SEQ ID NO: 5219 - protein, 9 aa, synthetic construct
  REGION 1..9: note = ATaRI peptide
ARVTHMAAR

SEQ ID NO: 5220 - protein, 22 aa, synthetic construct
  REGION 1..22: note = ATaRI peptide
RNKIAFLRVSPEVYLEKIGLML

SEQ ID NO: 5221 - protein, 15 aa, synthetic construct
  REGION 1..15: note = ATaRI peptide
TGQPRAPLVKAFLVE

SEQ ID NO: 5222 - protein, 26 aa, synthetic construct
  REGION 1..26: note = ATaRI peptide
KTAFPQQTRYLSFYLLVGTDHILQFS

SEQ ID NO: 5223 - protein, 10 aa, synthetic construct
  REGION 1..10: note = ATaRI peptide
YSFILDIQCK

SEQ ID NO: 5224 - protein, 9 aa, synthetic construct
  REGION 1..9: note = ATaRI peptide
PPFKSVWSR

SEQ ID NO: 5225 - protein, 23 aa, synthetic construct
  REGION 1..23: note = ATaRI peptide
DQKVIYISGKLLSACKMSYLKYF

SEQ ID NO: 5226 - protein, 15 aa, synthetic construct
  REGION 1..15: note = ATaRI peptide
LPQKDLFQVCVHEYT

SEQ ID NO: 5227 - protein, 23 aa, synthetic construct
  REGION 1..23: note = ATaRI peptide
QMDESFREVNFLPSSLFSFFPSA

SEQ ID NO: 5228 - protein, 25 aa, synthetic construct
  REGION 1..25: note = ATaRI peptide
QRNIVSRKVLFPGVIQCEKSKYISA

SEQ ID NO: 5229 - protein, 56 aa, synthetic construct
  REGION 1..56: note = ATaRI peptide
ASQPQSKEVCRHDVSFIHCFSSCQKLTHGQLKMRSTRTCMTNVYLFGQRGRVRLSL

SEQ ID NO: 5230 - protein, 43 aa, synthetic construct
  REGION 1..43: note = ATaRI peptide
KTRLLESRVSFIFSCRRSVIPWCRSPALGIRQYSSLRSRVFLE

SEQ ID NO: 5231 - protein, 13 aa, synthetic construct
  REGION 1..13: note = ATaRI peptide
IRERQRAQVGRSI

SEQ ID NO: 5232 - protein, 10 aa, synthetic construct
  REGION 1..10: note = ATaRI peptide
KRTFSYYAGG

SEQ ID NO: 5233 - protein, 21 aa, synthetic construct
  REGION 1..21: note = ATaRI peptide
DHLKNANKVNISFLNSYNLNA

SEQ ID NO: 5234 - protein, 12 aa, synthetic construct
  REGION 1..12: note = ATaRI peptide
DFKQTVNKGKRK

SEQ ID NO: 5235 - protein, 75 aa, synthetic construct
  REGION 1..75: note = ATaRI peptide
YVLSYLQPVSKYEKENTIEKIQRNKSQNFFFFIIFVGIVSFSLSSLAFLRFPQNYLSPELSICVPGSLKWSRLLY

SEQ ID NO: 5236 - protein, 11 aa, synthetic construct
  REGION 1..11: note = ATaRI peptide
NLWERSSGVSL

SEQ ID NO: 5237 - protein, 10 aa, synthetic construct
  REGION 1..10: note = ATaRI peptide
EVRVSKKPVC

SEQ ID NO: 5238 - protein, 25 aa, synthetic construct
  REGION 1..25: note = ATaRI peptide
DQRFSLKQVSTNNQNAHKIGLNVQE

SEQ ID NO: 5239 - protein, 37 aa, synthetic construct
  REGION 1..37: note = ATaRI peptide
LSECMDPKRYIWEAVFSSRAFCNQDTHQVLSGQHNIV

SEQ ID NO: 5240 - protein, 17 aa, synthetic construct
  REGION 1..17: note = ATaRI peptide
VIAASKRKVGPVSNYDL

SEQ ID NO: 5241 - protein, 20 aa, synthetic construct
  REGION 1..20: note = ATaRI peptide
QIVTESEKVKTFLSLLYYIM

SEQ ID NO: 5242 - protein, 11 aa, synthetic construct
  REGION 1..11: note = ATaRI peptide
FDGNSSKGVSI

SEQ ID NO: 5243 - protein, 13 aa, synthetic construct
  REGION 1..13: note = ATaRI peptide
LRLQEESEVRLCH

SEQ ID NO: 5244 - protein, 34 aa, synthetic construct
  REGION 1..34: note = ATaRI peptide
RLVRRLEPGNDCFRKADRKIKPNPLFGVLYSFRA

SEQ ID NO: 5245 - protein, 9 aa, synthetic construct
  REGION 1..9: note = ATaRI peptide
VTSNIQRLR

SEQ ID NO: 5246 - protein, 9 aa, synthetic construct
  REGION 1..9: note = ATaRI peptide
TVLELPDNK

SEQ ID NO: 5247 - protein, 65 aa, synthetic construct
  REGION 1..65: note = ATaRI peptide
SLCSVPVEGKILQVVSELEITTRRLELTCLYKLSCLLLYSHSHTQLPSPKSLTDPTLTQGVHIAP

SEQ ID NO: 5248 - protein, 40 aa, synthetic construct
  REGION 1..40: note = ATaRI peptide
DVSHARFYASTAYLFSNISLGVSVRRPLYVEACSIACSTY

SEQ ID NO: 5249 - protein, 9 aa, synthetic construct
  REGION 1..9: note = ATaRI peptide
DAQVFLHLG

SEQ ID NO: 5250 - protein, 12 aa, synthetic construct
  REGION 1..12: note = ATaRI peptide
EAIHTDTDSELG

SEQ ID NO: 5251 - protein, 16 aa, synthetic construct
  REGION 1..16: note = ATaRI peptide
ITSSSKITMYVSVPPG

SEQ ID NO: 5252 - protein, 14 aa, synthetic construct
  REGION 1..14: note = ATaRI peptide
YGSEDMKEGKSRSQ

SEQ ID NO: 5253 - protein, 23 aa, synthetic construct
  REGION 1..23: note = ATaRI peptide
MNSELSVLGMWSMVCVQILSLLR

SEQ ID NO: 5254 - protein, 9 aa, synthetic construct
  REGION 1..9: note = ATaRI peptide
EDEIPETVS

SEQ ID NO: 5255 - protein, 84 aa, synthetic construct
  REGION 1..84: note = ATaRI peptide
GWSSVKGQVSFGRPGCESPLGARPPGFQADPVPADLGERAGESMSLCGGGQGRGPTAKRLTETVNTRWRMGPHMCLVRVWLTAP

SEQ ID NO: 5256 - protein, 9 aa, synthetic construct
  REGION 1..9: note = ATaRI peptide
TSRFGGPEM

SEQ ID NO: 5257 - protein, 26 aa, synthetic construct
  REGION 1..26: note = ATaRI peptide
TKEDVKEPGKISVEMTLTFTKLFCIY

SEQ ID NO: 5258 - protein, 12 aa, synthetic construct
  REGION 1..12: note = ATaRI peptide
LIEFFDRKGNIY

SEQ ID NO: 5259 - protein, 60 aa, synthetic construct
  REGION 1..60: note = ATaRI peptide
KEGVQNAKVSVAFTEHHQGTVTLLSQWLSHGGLKKDKDQGENQGRESHAFHPCLETIFLR

SEQ ID NO: 5260 - protein, 47 aa, synthetic construct
  REGION 1..47: note = ATaRI peptide
VQRLTKSKGELNIHTCHPLFHIYFGHNTIWYVHQNFKLEKIHVTLMK

SEQ ID NO: 5261 - protein, 38 aa, synthetic construct
  REGION 1..38: note = ATaRI peptide
RIEAVLYAGNLKFIFFLLYFVFYLNHLHSTFCITDTFI

SEQ ID NO: 5262 - protein, 35 aa, synthetic construct
  REGION 1..35: note = ATaRI peptide
VLVLYSKSGECPFLALRSTIGVGWDSGEGVGGRRR

SEQ ID NO: 5263 - protein, 57 aa, synthetic construct
  REGION 1..57: note = ATaRI peptide
EALHGEADVSFLSFPLTVLFERITDRWNHYDFPLQALLQLPWSVEASSTSVCPSRTS

SEQ ID NO: 5264 - protein, 17 aa, synthetic construct
  REGION 1..17: note = ATaRI peptide
KEKVAFVSGEYLWDFLL

SEQ ID NO: 5265 - protein, 9 aa, synthetic construct
  REGION 1..9: note = ATaRI peptide
VTYLASVPR

SEQ ID NO: 5266 - protein, 21 aa, synthetic construct
  REGION 1..21: note = ATaRI peptide
LFEQDAEKVGREQAKPEPGWG

SEQ ID NO: 5267 - protein, 10 aa, synthetic construct
  REGION 1..10: note = ATaRI peptide
NHFAMNSMVS

SEQ ID NO: 5268 - protein, 38 aa, synthetic construct
  REGION 1..38: note = ATaRI peptide
VFHQKAEQVRCRNLQQLLLVGRVGHGQGRAGWEHTHSL

SEQ ID NO: 5269 - protein, 26 aa, synthetic construct
  REGION 1..26: note = ATaRI peptide
QVTQAYTEVRMEQGNHGSWACLHVGG

SEQ ID NO: 5270 - protein, 29 aa, synthetic construct
  REGION 1..29: note = ATaRI peptide
VFQQDVQQVTGSEPRCPLSILGGRPSSSP

SEQ ID NO: 5271 - protein, 27 aa, synthetic construct
  REGION 1..27: note = ATaRI peptide
SFHTHTKEVRGASGERAFCPARVRSAS

SEQ ID NO: 5272 - protein, 10 aa, synthetic construct
  REGION 1..10: note = ATaRI peptide
YITEVQASGG

SEQ ID NO: 5273 - protein, 34 aa, synthetic construct
  REGION 1..34: note = ATaRI peptide
HLQAEVKQVSPALLPSAWVSQPAEPDLGPAPGMR

SEQ ID NO: 5274 - protein, 29 aa, synthetic construct
  REGION 1..29: note = ATaRI peptide
EQFQLAIEVTPKSGCTVLPSPFCSVPQAG

SEQ ID NO: 5275 - protein, 48 aa, synthetic construct
  REGION 1..48: note = ATaRI peptide
AFYKTSEQVREKTVGLVGLRLPGGHFLPCSVNVQCLCQREACPFSTNI

SEQ ID NO: 5276 - protein, 10 aa, synthetic construct
  REGION 1..10: note = ATaRI peptide
RGPEQQVKGQ

SEQ ID NO: 5277 - protein, 72 aa, synthetic construct
  REGION 1..72: note = ATaRI peptide
GEFRVPAKVGNIPEPPPDPPRTLHSGQFHIMEAKTASVSKNTWLQWQGGKHVNVLKDCLFRNLNTQRIAAAG

SEQ ID NO: 5278 - protein, 21 aa, synthetic construct
  REGION 1..21: note = ATaRI peptide
KRKSARKKEYVLASAQLAGSP

SEQ ID NO: 5279 - protein, 15 aa, synthetic construct
  REGION 1..15: note = ATaRI peptide
EHAGTFFDVSCVFHS

SEQ ID NO: 5280 - protein, 44 aa, synthetic construct
  REGION 1..44: note = ATaRI peptide
PQGDSADEVLTGGPGVVHQEGLLTCLLPQVLSTRPSQISISVLP

SEQ ID NO: 5281 - protein, 52 aa, synthetic construct
  REGION 1..52: note = ATaRI peptide
EKLVKNKLVSGGPGGSSVCVSPSHCSRLASVCRFLLCTCPHSSYVIAANDGF

SEQ ID NO: 5282 - protein, 50 aa, synthetic construct
  REGION 1..50: note = ATaRI peptide
LLVPVSSVGNKFMFSPWHILSVWGWGNGRFDICLVLCFSDSNLHILHLFL

SEQ ID NO: 5283 - protein, 9 aa, synthetic construct
  REGION 1..9: note = ATaRI peptide
KAKALRGRM

SEQ ID NO: 5284 - protein, 11 aa, synthetic construct
  REGION 1..11: note = ATaRI peptide
LGRLQGFEVSL

SEQ ID NO: 5285 - protein, 50 aa, synthetic construct
  REGION 1..50: note = ATaRI peptide
ETQRDFLNGGCWAWFLAGLCQGTPRPLSFLGSRFMLSYEPRSHFIGTPTL

SEQ ID NO: 5286 - protein, 46 aa, synthetic construct
  REGION 1..46: note = ATaRI peptide
EFVRLPEYGESQPSPGPPGSGIEAPGCLSQTPGHVDMSGHHARGTF

SEQ ID NO: 5287 - protein, 9 aa, synthetic construct
  REGION 1..9: note = ATaRI peptide
TSYILILEL

SEQ ID NO: 5288 - protein, 11 aa, synthetic construct
  REGION 1..11: note = ATaRI peptide
SRPRLLSQVLA

SEQ ID NO: 5289 - protein, 15 aa, synthetic construct
  REGION 1..15: note = ATaRI peptide
TGDYTRAAVSGGGTG

SEQ ID NO: 5290 - protein, 9 aa, synthetic construct
  REGION 1..9: note = ATaRI peptide
RTLSSSMGK

SEQ ID NO: 5291 - protein, 9 aa, synthetic construct
  REGION 1..9: note = ATaRI peptide
NMPIITSKR

SEQ ID NO: 5292 - protein, 9 aa, synthetic construct
  REGION 1..9: note = ATaRI peptide
EHCSVFLTR

SEQ ID NO: 5293 - protein, 54 aa, synthetic construct
  REGION 1..54: note = ATaRI peptide
QGAGLHQLGELGRGAPPPAAPSPPGTTASVSDARPVVPAVCLAWLLAWPSPWLS

SEQ ID NO: 5294 - protein, 18 aa, synthetic construct
  REGION 1..18: note = ATaRI peptide
LYAMTEKQVGAAPVRRCG

SEQ ID NO: 5295 - protein, 9 aa, synthetic construct
  REGION 1..9: note = ATaRI peptide
FYNCSVHQS

SEQ ID NO: 5296 - protein, 26 aa, synthetic construct
  REGION 1..26: note = ATaRI peptide
EGRVNVSEVRPGKGEGQVFRGGAELG

SEQ ID NO: 5297 - protein, 48 aa, synthetic construct
  REGION 1..48: note = ATaRI peptide
RVALECKEGLLGPGLTGATATSEPGPGLSPHLLPTAAPTLLQLSLQCS

SEQ ID NO: 5298 - protein, 28 aa, synthetic construct
  REGION 1..28: note = ATaRI peptide
HPVLKEMEVGPLAPGGHRNSEAAAIFCL

SEQ ID NO: 5299 - protein, 37 aa, synthetic construct
  REGION 1..37: note = ATaRI peptide
GPSCRDTMVSKSDMTLALRAHILLGFPIIGNRQDLFM

SEQ ID NO: 5300 - protein, 12 aa, synthetic construct
  REGION 1..12: note = ATaRI peptide
QGIPELIEVLSS

SEQ ID NO: 5301 - protein, 80 aa, synthetic construct
  REGION 1..80: note = ATaRI peptide
AHQAIGLKVRYLGILCGALCRSSGVTWRHRGQRLAPSELGLISDLQPCPSVPSLWPHLMVLNPHTLPTCAVAFGSHVPSF

SEQ ID NO: 5302 - protein, 21 aa, synthetic construct
  REGION 1..21: note = ATaRI peptide
AFCLTEPARSVSAQNVIPQQL

SEQ ID NO: 5303 - protein, 28 aa, synthetic construct
  REGION 1..28: note = ATaRI peptide
HYILNGSKVGFLPHGHIRVSVTTFTATE

SEQ ID NO: 5304 - protein, 36 aa, synthetic construct
  REGION 1..36: note = ATaRI peptide
GEVGDGFKVSCQPQPLVPGSVMSAVCRPQLLPYPCS

SEQ ID NO: 5305 - protein, 52 aa, synthetic construct
  REGION 1..52: note = ATaRI peptide
LNAGYILNGESFPGYLGLSTLLELWFSSLPGQGKSEARCSWLDLPGNLMASW

SEQ ID NO: 5306 - protein, 75 aa, synthetic construct
  REGION 1..75: note = ATaRI peptide
ATRQEIFQGESQWLGDAWDLGLVSSGGSRVRTVIYWSLLSARPLRCFRPTITFDPQVVVVGFLQYLRNWKFRERK

SEQ ID NO: 5307 - protein, 9 aa, synthetic construct
  REGION 1..9: note = ATaRI peptide
FCLDCTLRR

SEQ ID NO: 5308 - protein, 35 aa, synthetic construct
  REGION 1..35: note = ATaRI peptide
KGLSDIHHRQVILLSPGSKRIQKMICPLLLGSFRE

SEQ ID NO: 5309 - protein, 18 aa, synthetic construct
  REGION 1..18: note = ATaRI peptide
PVDLVVKKVGACDWYSPF

SEQ ID NO: 5310 - protein, 72 aa, synthetic construct
  REGION 1..72: note = ATaRI peptide
LAAGSRLLVGFCLSFLLKCFPNLPLVSTLKFDPFFFFLRLKRQGWKNLPYYFLIGMEMGYLKRASKLSDKNL

SEQ ID NO: 5311 - protein, 20 aa, synthetic construct
  REGION 1..20: note = ATaRI peptide
SPPKCWDYRCEPLFPARNRF

SEQ ID NO: 5312 - protein, 9 aa, synthetic construct
  REGION 1..9: note = ATaRI peptide
KLEGILKYT

SEQ ID NO: 5313 - protein, 9 aa, synthetic construct
  REGION 1..9: note = ATaRI peptide
SSSKIICCR

SEQ ID NO: 5314 - protein, 11 aa, synthetic construct
  REGION 1..11: note = ATaRI peptide
WSICWNPSRYS

SEQ ID NO: 5315 - protein, 9 aa, synthetic construct
  REGION 1..9: note = ATaRI peptide
DDSPRDDNL

SEQ ID NO: 5316 - protein, 18 aa, synthetic construct
  REGION 1..18: note = ATaRI peptide
ANHIILCQVGSSMLKELG

SEQ ID NO: 5317 - protein, 20 aa, synthetic construct
  REGION 1..20: note = ATaRI peptide
DTKELLFQVKSLRGPRDIIL

SEQ ID NO: 5318 - protein, 11 aa, synthetic construct
  REGION 1..11: note = ATaRI peptide
LDFETAKKVSI

SEQ ID NO: 5319 - protein, 42 aa, synthetic construct
  REGION 1..42: note = ATaRI peptide
LCMFEYAKVTYPVPGPSSSLEPTGILTCGVQVIFPKSAADKN

SEQ ID NO: 5320 - protein, 10 aa, synthetic construct
  REGION 1..10: note = ATaRI peptide
MQCLDIAQGV

SEQ ID NO: 5321 - protein, 44 aa, synthetic construct
  REGION 1..44: note = ATaRI peptide
YHAIHRHTVRWLGHQHLRVPSPELGVPGISKEQQTGWNVTHWSQ

SEQ ID NO: 5322 - protein, 11 aa, synthetic construct
  REGION 1..11: note = ATaRI peptide
SEVASILQVSG

SEQ ID NO: 5323 - protein, 34 aa, synthetic construct
  REGION 1..34: note = ATaRI peptide
DDAVSITVVRKKLHIFNLLSKCINWDWFLFWKIN

SEQ ID NO: 5324 - protein, 31 aa, synthetic construct
  REGION 1..31: note = ATaRI peptide
LVRCGKAKVNFFPDLKKAVPLFETIFSIIFC

SEQ ID NO: 5325 - protein, 42 aa, synthetic construct
  REGION 1..42: note = ATaRI peptide
TSDGLHAEVLYRFLKTNKNSIPLRNLVFNIPNSSSVLPSKGL

SEQ ID NO: 5326 - protein, 35 aa, synthetic construct
  REGION 1..35: note = ATaRI peptide
NTLEVTNQVILLEAVRCLYELPLNFKSQAVTITLP

SEQ ID NO: 5327 - protein, 11 aa, synthetic construct
  REGION 1..11: note = ATaRI peptide
SEGKITGRVNI

SEQ ID NO: 5328 - protein, 22 aa, synthetic construct
  REGION 1..22: note = ATaRI peptide
LYGGFSRLVSTILKKKNTLKGS

SEQ ID NO: 5329 - protein, 19 aa, synthetic construct
  REGION 1..19: note = ATaRI peptide
VRKYSSTERYFFFFKFLKS

SEQ ID NO: 5330 - protein, 9 aa, synthetic construct
  REGION 1..9: note = ATaRI peptide
FLAFTQLPK

SEQ ID NO: 5331 - protein, 12 aa, synthetic construct
  REGION 1..12: note = ATaRI peptide
LEKFNSHVVSYN

SEQ ID NO: 5332 - protein, 17 aa, synthetic construct
  REGION 1..17: note = ATaRI peptide
RTLFKLFQVRACIFLVR

SEQ ID NO: 5333 - protein, 13 aa, synthetic construct
  REGION 1..13: note = ATaRI peptide
LVMKAIIEVREQF

SEQ ID NO: 5334 - protein, 9 aa, synthetic construct
  REGION 1..9: note = ATaRI peptide
SDQRMLTNR

SEQ ID NO: 5335 - protein, 50 aa, synthetic construct
  REGION 1..50: note = ATaRI peptide
SWNHHEFEVKFDFSSILILKNKACTIWGVIFFKKICNYISGLYLSPFNVM

SEQ ID NO: 5336 - protein, 18 aa, synthetic construct
  REGION 1..18: note = ATaRI peptide
YIIGMLERVRISFKEITI

SEQ ID NO: 5337 - protein, 10 aa, synthetic construct
  REGION 1..10: note = ATaRI peptide
LNKLILNKVQ

SEQ ID NO: 5338 - protein, 18 aa, synthetic construct
  REGION 1..18: note = ATaRI peptide
SRATVPLQVRILVYVLQI

SEQ ID NO: 5339 - protein, 44 aa, synthetic construct
  REGION 1..44: note = ATaRI peptide
TCLPHIIQVSYVIKLGAILRIIFSEFYYQYQSLFCCSLFHFQKA

SEQ ID NO: 5340 - protein, 17 aa, synthetic construct
  REGION 1..17: note = ATaRI peptide
KQAFKSEEVSQVNPLNT

SEQ ID NO: 5341 - protein, 9 aa, synthetic construct
  REGION 1..9: note = ATaRI peptide
EAIWSSEMR

SEQ ID NO: 5342 - protein, 20 aa, synthetic construct
  REGION 1..20: note = ATaRI peptide
PDWPIKDPVSQQFNLCHLKP

SEQ ID NO: 5343 - protein, 57 aa, synthetic construct
  REGION 1..57: note = ATaRI peptide
PDKNPEGRVCTAVGIQALGFLLLYYYVVGEKYITFCASICLIIYTQCMFNKLLATCP

SEQ ID NO: 5344 - protein, 16 aa, synthetic construct
  REGION 1..16: note = ATaRI peptide
ILFNRHKEGKMSVLRF

SEQ ID NO: 5345 - protein, 16 aa, synthetic construct
  REGION 1..16: note = ATaRI peptide
CRVLYFGKVGLIFNAF

SEQ ID NO: 5346 - protein, 14 aa, synthetic construct
  REGION 1..14: note = ATaRI peptide
KSEETNQQVTLTLL

SEQ ID NO: 5347 - protein, 27 aa, synthetic construct
  REGION 1..27: note = ATaRI peptide
LAVASVTEVCASQVAWVLINSARSFKQ

SEQ ID NO: 5348 - protein, 10 aa, synthetic construct
  REGION 1..10: note = ATaRI peptide
RNVIKYNPGM

SEQ ID NO: 5349 - protein, 27 aa, synthetic construct
  REGION 1..27: note = ATaRI peptide
QVQQLALEVKAFCTKACCLSYHLPCVI

SEQ ID NO: 5350 - protein, 20 aa, synthetic construct
  REGION 1..20: note = ATaRI peptide
DNPEANWKVKYTFILHLIFC

SEQ ID NO: 5351 - protein, 18 aa, synthetic construct
  REGION 1..18: note = ATaRI peptide
EQSELVAQVSDFLDLALF

SEQ ID NO: 5352 - protein, 16 aa, synthetic construct
  REGION 1..16: note = ATaRI peptide
RSLQYGEQVSLHRVNF

SEQ ID NO: 5353 - protein, 9 aa, synthetic construct
  REGION 1..9: note = ATaRI peptide
LERFKSSAR

SEQ ID NO: 5354 - protein, 42 aa, synthetic construct
  REGION 1..42: note = ATaRI peptide
ERGWAINVGECWECPRECPARLGGTGLKGGWGRAGGSWRWQL

SEQ ID NO: 5355 - protein, 22 aa, synthetic construct
  REGION 1..22: note = ATaRI peptide
IRKSNFLQVCLSLEFMCNEQFR

SEQ ID NO: 5356 - protein, 41 aa, synthetic construct
  REGION 1..41: note = ATaRI peptide
DLVKPAVDGETKQWDRCTVHLCIRGGQRILDCPKLFNISES

SEQ ID NO: 5357 - protein, 36 aa, synthetic construct
  REGION 1..36: note = ATaRI peptide
RLVYVFSQVFHNSNSLNFSWRAEPRGKYVKEANLGE

SEQ ID NO: 5358 - protein, 11 aa, synthetic construct
  REGION 1..11: note = ATaRI peptide
AHAQKICKVSV

SEQ ID NO: 5359 - protein, 57 aa, synthetic construct
  REGION 1..57: note = ATaRI peptide
AGYADIFLVRNLLIENKKIQGLSSLSHGLARASPTLLIVLCRIVSVLWVLSVSLGVG

SEQ ID NO: 5360 - protein, 28 aa, synthetic construct
  REGION 1..28: note = ATaRI peptide
TDFTFMVKVRKKGLFLVPFEICAVPYLQ

SEQ ID NO: 5361 - protein, 12 aa, synthetic construct
  REGION 1..12: note = ATaRI peptide
AKTHTTMSGERP

SEQ ID NO: 5362 - protein, 22 aa, synthetic construct
  REGION 1..22: note = ATaRI peptide
PVRECHDPRWVVGRCTFSHFAV

SEQ ID NO: 5363 - protein, 59 aa, synthetic construct
  REGION 1..59: note = ATaRI peptide
NMVDIIHSVSATSVCLACPSQPHSWALCFGLVRKHWTTWPPCQTAQVGNRVGTGPVATE

SEQ ID NO: 5364 - protein, 14 aa, synthetic construct
  REGION 1..14: note = ATaRI peptide
GNQPKVASGRMELL

SEQ ID NO: 5365 - protein, 60 aa, synthetic construct
  REGION 1..60: note = ATaRI peptide
LIVLGAVPRYVCCLTPFLPFILVSNVFLTLNYRTHFSCIVCLILKINPIFKNKCKYLNYL

SEQ ID NO: 5366 - protein, 22 aa, synthetic construct
  REGION 1..22: note = ATaRI peptide
SAITDIKRVCYFPFLAAQGRFF

SEQ ID NO: 5367 - protein, 20 aa, synthetic construct
  REGION 1..20: note = ATaRI peptide
DNQWAILDGETWVAALHWVG

SEQ ID NO: 5368 - protein, 26 aa, synthetic construct
  REGION 1..26: note = ATaRI peptide
GENFRIVLGKLVLFPQNFFFFFIMSV

SEQ ID NO: 5369 - protein, 29 aa, synthetic construct
  REGION 1..29: note = ATaRI peptide
IGALRTSKVGLAGDADLPVARGSSWMLSG

SEQ ID NO: 5370 - protein, 9 aa, synthetic construct
  REGION 1..9: note = ATaRI peptide
REIGHKNPR

SEQ ID NO: 5371 - protein, 38 aa, synthetic construct
  REGION 1..38: note = ATaRI peptide
IGRFFLSSGKSQASPEELVPEAQGPPRAGAPSTQPSEG

SEQ ID NO: 5372 - protein, 17 aa, synthetic construct
  REGION 1..17: note = ATaRI peptide
TQVVEKSLRLVEKIGKL

SEQ ID NO: 5373 - protein, 33 aa, synthetic construct
  REGION 1..33: note = ATaRI peptide
EDIEKLEIRYVPWGFTELLFCIPKENPRFNQKK

SEQ ID NO: 5374 - protein, 37 aa, synthetic construct
  REGION 1..37: note = ATaRI peptide
GDNVENNKVSPCYIIYNCIKIGLNGVPFSHLHYDKAI

SEQ ID NO: 5375 - protein, 26 aa, synthetic construct
  REGION 1..26: note = ATaRI peptide
QMATQRFPSKCLVLLKHAIYFSLTFL

SEQ ID NO: 5376 - protein, 38 aa, synthetic construct
  REGION 1..38: note = ATaRI peptide
WGSLSKSKVSPYIFYFVFTLLNVVTSYDPLSLTYLLPN

SEQ ID NO: 5377 - protein, 9 aa, synthetic construct
  REGION 1..9: note = ATaRI peptide
SSSAKYGSK

SEQ ID NO: 5378 - protein, 16 aa, synthetic construct
  REGION 1..16: note = ATaRI peptide
RELRGRLHVSKFIKLP

SEQ ID NO: 5379 - protein, 28 aa, synthetic construct
  REGION 1..28: note = ATaRI peptide
ETYEEIYKVSHAILFIALQISAVLSRTA

SEQ ID NO: 5380 - protein, 9 aa, synthetic construct
  REGION 1..9: note = ATaRI peptide
AIKYNQKEV

SEQ ID NO: 5381 - protein, 15 aa, synthetic construct
  REGION 1..15: note = ATaRI peptide
LKVVAHNKVTIYYVN

SEQ ID NO: 5382 - protein, 11 aa, synthetic construct
  REGION 1..11: note = ATaRI peptide
VKRQNSLKVRN

SEQ ID NO: 5383 - protein, 16 aa, synthetic construct
  REGION 1..16: note = ATaRI peptide
GGVVNAAKGKFIKYNC

SEQ ID NO: 5384 - protein, 14 aa, synthetic construct
  REGION 1..14: note = ATaRI peptide
DSDGQRRSSKWHLF

SEQ ID NO: 5385 - protein, 26 aa, synthetic construct
  REGION 1..26: note = ATaRI peptide
VKVVIPTERYMFFFIITDLNIDNIPF

SEQ ID NO: 5386 - protein, 9 aa, synthetic construct
  REGION 1..9: note = ATaRI peptide
SKKGALKEE

SEQ ID NO: 5387 - protein, 38 aa, synthetic construct
  REGION 1..38: note = ATaRI peptide
HLQSENFKVRLLFYYFCPSVLNGWGEGIEGLEKCIRQV

SEQ ID NO: 5388 - protein, 15 aa, synthetic construct
  REGION 1..15: note = ATaRI peptide
ECTPTRKERYNISHI

SEQ ID NO: 5389 - protein, 9 aa, synthetic construct
  REGION 1..9: note = ATaRI peptide
RDVSKKAKR

SEQ ID NO: 5390 - protein, 14 aa, synthetic construct
  REGION 1..14: note = ATaRI peptide
PLDVTASSVSEGMR

SEQ ID NO: 5391 - protein, 9 aa, synthetic construct
  REGION 1..9: note = ATaRI peptide
EQKTLDKAR

SEQ ID NO: 5392 - protein, 10 aa, synthetic construct
  REGION 1..10: note = ATaRI peptide
KMTKGDFIGK

SEQ ID NO: 5393 - protein, 9 aa, synthetic construct
  REGION 1..9: note = ATaRI peptide
MDKNLQGRL

SEQ ID NO: 5394 - protein, 15 aa, synthetic construct
  REGION 1..15: note = ATaRI peptide
GGTEEENRGISWLCC

SEQ ID NO: 5395 - protein, 21 aa, synthetic construct
  REGION 1..21: note = ATaRI peptide
RDPSVTHKVGHPTGRPWASET

SEQ ID NO: 5396 - protein, 9 aa, synthetic construct
  REGION 1..9: note = ATaRI peptide
TPQVSDSMR

SEQ ID NO: 5397 - protein, 60 aa, synthetic construct
  REGION 1..60: note = ATaRI peptide
ANDSMEQGVSAAWRPPSSDTGSRHLPTSSGQPSDAPLLGAAGNRLSCGTLQRAVGSGSDS

SEQ ID NO: 5398 - protein, 36 aa, synthetic construct
  REGION 1..36: note = ATaRI peptide
RRPRHLFLVSARSPSPAQELPSSMRFSRAIIQGQVE

SEQ ID NO: 5399 - protein, 10 aa, synthetic construct
  REGION 1..10: note = ATaRI peptide
NRIRRTEEGK

SEQ ID NO: 5400 - protein, 13 aa, synthetic construct
  REGION 1..13: note = ATaRI peptide
PYMDTTLKVRTGL

SEQ ID NO: 5401 - protein, 14 aa, synthetic construct
  REGION 1..14: note = ATaRI peptide
PVQLYKEMVLFSNF

SEQ ID NO: 5402 - protein, 22 aa, synthetic construct
  REGION 1..22: note = ATaRI peptide
GHLGDCYSRWVTPLGTLLQKSS

SEQ ID NO: 5403 - protein, 24 aa, synthetic construct
  REGION 1..24: note = ATaRI peptide
NLDEELNEVIIVFCFLSNIFNISF

SEQ ID NO: 5404 - protein, 15 aa, synthetic construct
  REGION 1..15: note = ATaRI peptide
NEMKSHSEVWSSARC

SEQ ID NO: 5405 - protein, 78 aa, synthetic construct
  REGION 1..78: note = ATaRI peptide
TLAVANMKVNIWCQVPPGWGTGRPQGRRGQHPAPRSTQTSWKREALRKQCWATASLCCKLPRERGGGWRASWKRRLNP

SEQ ID NO: 5406 - protein, 22 aa, synthetic construct
  REGION 1..22: note = ATaRI peptide
NLVPGRIQVRPLDRYLFQHFCY

SEQ ID NO: 5407 - protein, 42 aa, synthetic construct
  REGION 1..42: note = ATaRI peptide
DQSASEITRYEPMRMESPLLAWTPSLYCEGGKQHFGTCAVFN

SEQ ID NO: 5408 - protein, 27 aa, synthetic construct
  REGION 1..27: note = ATaRI peptide
WQWGQENKVCNLIALVTVGFYVVSEIF

SEQ ID NO: 5409 - protein, 16 aa, synthetic construct
  REGION 1..16: note = ATaRI peptide
AVDLCLKTVCIATNYV

SEQ ID NO: 5410 - protein, 9 aa, synthetic construct
  REGION 1..9: note = ATaRI peptide
QLARQALDR

SEQ ID NO: 5411 - protein, 14 aa, synthetic construct
  REGION 1..14: note = ATaRI peptide
VSSFSIKQVSIYFV

SEQ ID NO: 5412 - protein, 9 aa, synthetic construct
  REGION 1..9: note = ATaRI peptide
RFNKKLITG

SEQ ID NO: 5413 - protein, 26 aa, synthetic construct
  REGION 1..26: note = ATaRI peptide
HLNGVPRKVNNVSPHSHPLSLSVPYL

SEQ ID NO: 5414 - protein, 12 aa, synthetic construct
  REGION 1..12: note = ATaRI peptide
YDFPGSNSVSNR

SEQ ID NO: 5415 - protein, 9 aa, synthetic construct
  REGION 1..9: note = ATaRI peptide
NSFRMLYQR

SEQ ID NO: 5416 - protein, 9 aa, synthetic construct
  REGION 1..9: note = ATaRI peptide
FKESTCIHR

SEQ ID NO: 5417 - protein, 10 aa, synthetic construct
  REGION 1..10: note = ATaRI peptide
PLEATFDLVL

SEQ ID NO: 5418 - protein, 43 aa, synthetic construct
  REGION 1..43: note = ATaRI peptide
ELEKEIANVKHIFFSDTLNNVNRFFSFPSLSYFKSKRYSTLTK

SEQ ID NO: 5419 - protein, 37 aa, synthetic construct
  REGION 1..37: note = ATaRI peptide
KLNNEYLEVSLYKIDSGLLILRAGSSVIFSYGVPEII

SEQ ID NO: 5420 - protein, 14 aa, synthetic construct
  REGION 1..14: note = ATaRI peptide
VDNTCSLFRYYIFR

SEQ ID NO: 5421 - protein, 16 aa, synthetic construct
  REGION 1..16: note = ATaRI peptide
KKLGIQVKGIEEPQKS

SEQ ID NO: 5422 - protein, 11 aa, synthetic construct
  REGION 1..11: note = ATaRI peptide
LVSRHPFPGKN

SEQ ID NO: 5423 - protein, 43 aa, synthetic construct
  REGION 1..43: note = ATaRI peptide
DFSASVKKVIFDTANHYKKLNGFLLYTSIYNEFFRVLLFENLV

SEQ ID NO: 5424 - protein, 66 aa, synthetic construct
  REGION 1..66: note = ATaRI peptide
PIKTVGVQVSCVNSFTSDILFFFFLFLRRSLTVLPRLERSGVISAHCNLRLLGSSTLSTNLEIRIT

SEQ ID NO: 5425 - protein, 20 aa, synthetic construct
  REGION 1..20: note = ATaRI peptide
PRMCHNVNRCVSQELGWGLV

SEQ ID NO: 5426 - protein, 23 aa, synthetic construct
  REGION 1..23: note = ATaRI peptide
RSSKEVKKVSFYPPIMSKPLDST

SEQ ID NO: 5427 - protein, 27 aa, synthetic construct
  REGION 1..27: note = ATaRI peptide
STERYNPEVSCHNWQSILLATAINMAL

SEQ ID NO: 5428 - protein, 28 aa, synthetic construct
  REGION 1..28: note = ATaRI peptide
EVQEGRAWVSAERRAGARACLSAHGAGR

SEQ ID NO: 5429 - protein, 10 aa, synthetic construct
  REGION 1..10: note = ATaRI peptide
ALQTQVKRVS

SEQ ID NO: 5430 - protein, 9 aa, synthetic construct
  REGION 1..9: note = ATaRI peptide
LIDRVFGIR

SEQ ID NO: 5431 - protein, 21 aa, synthetic construct
  REGION 1..21: note = ATaRI peptide
SQAASAINRYFKINFVSAYCM

SEQ ID NO: 5432 - protein, 9 aa, synthetic construct
  REGION 1..9: note = ATaRI peptide
EEIKFSHTE

SEQ ID NO: 5433 - protein, 26 aa, synthetic construct
  REGION 1..26: note = ATaRI peptide
LTVSYDEAGMFVFKTHIFFPCKKNSL

SEQ ID NO: 5434 - protein, 23 aa, synthetic construct
  REGION 1..23: note = ATaRI peptide
ERKRIKRAGELVNTSKKCLLSCW

SEQ ID NO: 5435 - protein, 13 aa, synthetic construct
  REGION 1..13: note = ATaRI peptide
LIDPNTLQGKFWK

SEQ ID NO: 5436 - protein, 45 aa, synthetic construct
  REGION 1..45: note = ATaRI peptide
GAGMISKKVSYILPASVFFFPLSYYCFSPSFKKNLLVFPQYGIQT

SEQ ID NO: 5437 - protein, 54 aa, synthetic construct
  REGION 1..54: note = ATaRI peptide
ENMDTDDERSRFSLNLLCCLKGNIYDKYFLCCKEIGITQLILALNYNLGFLSRY

SEQ ID NO: 5438 - protein, 24 aa, synthetic construct
  REGION 1..24: note = ATaRI peptide
PKISWTSKVSFNFFLSGIKVTLLT

SEQ ID NO: 5439 - protein, 14 aa, synthetic construct
  REGION 1..14: note = ATaRI peptide
PALWVHNTVSTLPV

SEQ ID NO: 5440 - protein, 12 aa, synthetic construct
  REGION 1..12: note = ATaRI peptide
NTSELLFKVREV

SEQ ID NO: 5441 - protein, 74 aa, synthetic construct
  REGION 1..74: note = ATaRI peptide
AELKPYITGESPKDILTISMQLFDGHTSWLSVDALLLEAAGWECHYLGNWDDSSWKNGYLVGFTHYIQVSYCLC

SEQ ID NO: 5442 - protein, 9 aa, synthetic construct
  REGION 1..9: note = ATaRI peptide
SSNLKIHAR

SEQ ID NO: 5443 - protein, 21 aa, synthetic construct
  REGION 1..21: note = ATaRI peptide
ITHSRKHTGKFDRERLLKIKL

SEQ ID NO: 5444 - protein, 35 aa, synthetic construct
  REGION 1..35: note = ATaRI peptide
KHKTKVHSGKCLCFVCLFVCFNLVLILVLFLKMLR

SEQ ID NO: 5445 - protein, 17 aa, synthetic construct
  REGION 1..17: note = ATaRI peptide
GHRVDYFIGRIISVKSY

SEQ ID NO: 5446 - protein, 35 aa, synthetic construct
  REGION 1..35: note = ATaRI peptide
KDSELLIHGKRVVISYSSRLIISLKSLFILHHFET

SEQ ID NO: 5447 - protein, 37 aa, synthetic construct
  REGION 1..37: note = ATaRI peptide
GMPCPGEDSECLYTSYLLQELLCYGTSEKEIRDRIFS

SEQ ID NO: 5448 - protein, 28 aa, synthetic construct
  REGION 1..28: note = ATaRI peptide
CGRHSLPQVRCLSFFFFFFLRACLITLL

SEQ ID NO: 5449 - protein, 9 aa, synthetic construct
  REGION 1..9: note = ATaRI peptide
RKLPEEHAR

SEQ ID NO: 5450 - protein, 9 aa, synthetic construct
  REGION 1..9: note = ATaRI peptide
VLKSFLNKV

SEQ ID NO: 5451 - protein, 12 aa, synthetic construct
  REGION 1..12: note = ATaRI peptide
FRNVDWDMVCKF

SEQ ID NO: 5452 - protein, 33 aa, synthetic construct
  REGION 1..33: note = ATaRI peptide
KEAEYAGQVRITVCIMVPFQHGNGNCYFSLFFF

SEQ ID NO: 5453 - protein, 9 aa, synthetic construct
  REGION 1..9: note = ATaRI peptide
AVSDIPRLM

SEQ ID NO: 5454 - protein, 31 aa, synthetic construct
  REGION 1..31: note = ATaRI peptide
SSERTRVRGKTFSYLYLAILPGRKAVDREKG

SEQ ID NO: 5455 - protein, 26 aa, synthetic construct
  REGION 1..26: note = ATaRI peptide
LEIQEDENVSFTDFILLCVLYESVLL

SEQ ID NO: 5456 - protein, 33 aa, synthetic construct
  REGION 1..33: note = ATaRI peptide
RSTQYKFRVSQSFCYLNCLKMKLFSISPFTMSD

SEQ ID NO: 5457 - protein, 14 aa, synthetic construct
  REGION 1..14: note = ATaRI peptide
ISTGGHSQVGFVSI

SEQ ID NO: 5458 - protein, 10 aa, synthetic construct
  REGION 1..10: note = ATaRI peptide
HKEVHLEWGE

SEQ ID NO: 5459 - protein, 42 aa, synthetic construct
  REGION 1..42: note = ATaRI peptide
GCVLVGWEVSQAYSASTSVSSTLLPNTNTNYKEAANPKCTYR

SEQ ID NO: 5460 - protein, 19 aa, synthetic construct
  REGION 1..19: note = ATaRI peptide
LNCSQKGEVSIYIYYDFSS

SEQ ID NO: 5461 - protein, 27 aa, synthetic construct
  REGION 1..27: note = ATaRI peptide
CTQGEKFRVCKLGYFCVFQYSIILAWV

SEQ ID NO: 5462 - protein, 21 aa, synthetic construct
  REGION 1..21: note = ATaRI peptide
PSVALLLNGTCLICFKLHQIF

SEQ ID NO: 5463 - protein, 14 aa, synthetic construct
  REGION 1..14: note = ATaRI peptide
FLFNDCLEVKMYFT

SEQ ID NO: 5464 - protein, 11 aa, synthetic construct
  REGION 1..11: note = ATaRI peptide
NTICKADAVSS

SEQ ID NO: 5465 - protein, 60 aa, synthetic construct
  REGION 1..60: note = ATaRI peptide
DNDGAEDEGIFFHQIYLHDKGLNHFFHPFLFFYFLSFFEELFLIPVFDVFCLLACCYIQI

SEQ ID NO: 5466 - protein, 16 aa, synthetic construct
  REGION 1..16: note = ATaRI peptide
NRWSNSTKGIMQGCKF

SEQ ID NO: 5467 - protein, 43 aa, synthetic construct
  REGION 1..43: note = ATaRI peptide
VNIRDIDKVKSNADAYYFIEIILDNLFLALYSNLLTCSMFSDG

SEQ ID NO: 5468 - protein, 27 aa, synthetic construct
  REGION 1..27: note = ATaRI peptide
EKKDETQKVCDSSLCLRLFSLQWGRVV

SEQ ID NO: 5469 - protein, 13 aa, synthetic construct
  REGION 1..13: note = ATaRI peptide
EIIFKNGDGKEEY

SEQ ID NO: 5470 - protein, 9 aa, synthetic construct
  REGION 1..9: note = ATaRI peptide
CTKTREFER

SEQ ID NO: 5471 - protein, 11 aa, synthetic construct
  REGION 1..11: note = ATaRI peptide
LYTLLVIQVSV

SEQ ID NO: 5472 - protein, 9 aa, synthetic construct
  REGION 1..9: note = ATaRI peptide
RDDLVLVDR

SEQ ID NO: 5473 - protein, 19 aa, synthetic construct
  REGION 1..19: note = ATaRI peptide
SESTLMNTVGFNHIIVFRW

SEQ ID NO: 5474 - protein, 18 aa, synthetic construct
  REGION 1..18: note = ATaRI peptide
SEPEYMEDVSCYFFFCRF

SEQ ID NO: 5475 - protein, 12 aa, synthetic construct
  REGION 1..12: note = ATaRI peptide
QNFEQIFEVGIL

SEQ ID NO: 5476 - protein, 10 aa, synthetic construct
  REGION 1..10: note = ATaRI peptide
DVLKIYKSVS

SEQ ID NO: 5477 - protein, 9 aa, synthetic construct
  REGION 1..9: note = ATaRI peptide
ANCSHQVKQ

SEQ ID NO: 5478 - protein, 16 aa, synthetic construct
  REGION 1..16: note = ATaRI peptide
IQNNSKLLRYLNLSSQ

SEQ ID NO: 5479 - protein, 26 aa, synthetic construct
  REGION 1..26: note = ATaRI peptide
SWHNYMCNVSNPHSLYKNVTGFLHEY

SEQ ID NO: 5480 - protein, 38 aa, synthetic construct
  REGION 1..38: note = ATaRI peptide
EEATKHLEVSGFTYKRVFCVPFSFCLFFGDRFWLCCPG

SEQ ID NO: 5481 - protein, 42 aa, synthetic construct
  REGION 1..42: note = ATaRI peptide
GTFRIYGEVSSLSPALAFSVLTIYCLIIFLSEIPVSHETFLR

SEQ ID NO: 5482 - protein, 25 aa, synthetic construct
  REGION 1..25: note = ATaRI peptide
EYHIAYLKVCIRFILYSDIVAAFTT

SEQ ID NO: 5483 - protein, 15 aa, synthetic construct
  REGION 1..15: note = ATaRI peptide
FLIIFLVQVSFITQS

SEQ ID NO: 5484 - protein, 9 aa, synthetic construct
  REGION 1..9: note = ATaRI peptide
VKTLGKLER

SEQ ID NO: 5485 - protein, 9 aa, synthetic construct
  REGION 1..9: note = ATaRI peptide
LGATAVEDR

SEQ ID NO: 5486 - protein, 9 aa, synthetic construct
  REGION 1..9: note = ATaRI peptide
EQLRQLARR

SEQ ID NO: 5487 - protein, 22 aa, synthetic construct
  REGION 1..22: note = ATaRI peptide
LVQYFFYKVSFMYLESIIDIVI

SEQ ID NO: 5488 - protein, 9 aa, synthetic construct
  REGION 1..9: note = ATaRI peptide
LQNKPTLYR

SEQ ID NO: 5489 - protein, 24 aa, synthetic construct
  REGION 1..24: note = ATaRI peptide
PTSTEKAQVTTFYNKFNIFLVRDL

SEQ ID NO: 5490 - protein, 49 aa, synthetic construct
  REGION 1..49: note = ATaRI peptide
AGLLKVSEVSIPHTQSFSSHSYLLSEGKLCQYGIPASETFLSVCFLVFF

SEQ ID NO: 5491 - protein, 16 aa, synthetic construct
  REGION 1..16: note = ATaRI peptide
VPDTSVEKGNTAVFLA

SEQ ID NO: 5492 - protein, 12 aa, synthetic construct
  REGION 1..12: note = ATaRI peptide
GGLGAFTKVSMY

SEQ ID NO: 5493 - protein, 35 aa, synthetic construct
  REGION 1..35: note = ATaRI peptide
QKSGSQGSGKTDHHWEPFQQKLCPKFPLLVILFAI

SEQ ID NO: 5494 - protein, 87 aa, synthetic construct
  REGION 1..87: note = ATaRI peptide
ISGKATVSGELHCDIISLSFLSLGWNIFVCLFEIASHSVAQARVQYHNLDSLQPLPSRLKPSSHLSLLIIRDHRHMSPHPANFLCFW

SEQ ID NO: 5495 - protein, 36 aa, synthetic construct
  REGION 1..36: note = ATaRI peptide
HSFLYNNRGNVGLCGEWVLEDNDVRHEGCGMWSRGM

SEQ ID NO: 5496 - protein, 23 aa, synthetic construct
  REGION 1..23: note = ATaRI peptide
DLESRICVVRLLFLCAASWDSPV

SEQ ID NO: 5497 - protein, 71 aa, synthetic construct
  REGION 1..71: note = ATaRI peptide
NTPSQPRQVRGCGEGSRGPGWEQWKALASLGLGWKLEAPYLALILCVLSCGSAPCPVDYSRWLVPWIVCCQ

SEQ ID NO: 5498 - protein, 19 aa, synthetic construct
  REGION 1..19: note = ATaRI peptide
LTKITKVGVCVGVGDSAQV

SEQ ID NO: 5499 - protein, 53 aa, synthetic construct
  REGION 1..53: note = ATaRI peptide
ASQVAGTTGVCHHARLIFNFFVERVSPCCPGWSQTPGLKQFSLLGPHVYSFMR

SEQ ID NO: 5500 - protein, 33 aa, synthetic construct
  REGION 1..33: note = ATaRI peptide
WMTFPYGRVSTSLHLICQRKDHVRRLREMACKG

SEQ ID NO: 5501 - protein, 45 aa, synthetic construct
  REGION 1..45: note = ATaRI peptide
GDVVHFLLVSPNMTIRKPLTIFFIHQQLIMCQRNLCYYPKSLERE

SEQ ID NO: 5502 - protein, 14 aa, synthetic construct
  REGION 1..14: note = ATaRI peptide
QIFYLGTKVSSFTL

SEQ ID NO: 5503 - protein, 34 aa, synthetic construct
  REGION 1..34: note = ATaRI peptide
RKAIVADRVSILRGSLLEYSADLLLSFASIFGHE

SEQ ID NO: 5504 - protein, 18 aa, synthetic construct
  REGION 1..18: note = ATaRI peptide
NEFISPMEVRYFLTWIRN

SEQ ID NO: 5505 - protein, 9 aa, synthetic construct
  REGION 1..9: note = ATaRI peptide
IRMAEKAEL

SEQ ID NO: 5506 - protein, 31 aa, synthetic construct
  REGION 1..31: note = ATaRI peptide
YLRDPLREVSQDTALLFFLTQLSLLLSTNNC

SEQ ID NO: 5507 - protein, 33 aa, synthetic construct
  REGION 1..33: note = ATaRI peptide
ETVIKKLQVHIANIYWGKISSGKTIIKSSPKKF

SEQ ID NO: 5508 - protein, 52 aa, synthetic construct
  REGION 1..52: note = ATaRI peptide
GAFLIMLEVTLYYVSFIIFLSIPLFIHESILIMFQSQLQTVIYFTPEYFYHA

SEQ ID NO: 5509 - protein, 22 aa, synthetic construct
  REGION 1..22: note = ATaRI peptide
RLYRGSSRVMFAWLFIFLFPYL

SEQ ID NO: 5510 - protein, 9 aa, synthetic construct
  REGION 1..9: note = ATaRI peptide
PVSEKVDIW

SEQ ID NO: 5511 - protein, 26 aa, synthetic construct
  REGION 1..26: note = ATaRI peptide
IRRRREELRSAHPSFPTSLHPQVFRC

SEQ ID NO: 5512 - protein, 9 aa, synthetic construct
  REGION 1..9: note = ATaRI peptide
HKSGMQTKR

SEQ ID NO: 5513 - protein, 27 aa, synthetic construct
  REGION 1..27: note = ATaRI peptide
NYHWLNDEVSCIPSPFWLSLSLFIYYL

SEQ ID NO: 5514 - protein, 9 aa, synthetic construct
  REGION 1..9: note = ATaRI peptide
GHRICEILL

SEQ ID NO: 5515 - protein, 9 aa, synthetic construct
  REGION 1..9: note = ATaRI peptide
SSHGDIFSQ

SEQ ID NO: 5516 - protein, 9 aa, synthetic construct
  REGION 1..9: note = ATaRI peptide
QYQQRAFGW

SEQ ID NO: 5517 - protein, 31 aa, synthetic construct
  REGION 1..31: note = ATaRI peptide
HVHCYRCEVWLTALPCQSVAGVERLVRARFT

SEQ ID NO: 5518 - protein, 9 aa, synthetic construct
  REGION 1..9: note = ATaRI peptide
TGNYTCMLR

SEQ ID NO: 5519 - protein, 19 aa, synthetic construct
  REGION 1..19: note = ATaRI peptide
KHIEVKTQVMQSFCCCFCY

SEQ ID NO: 5520 - protein, 12 aa, synthetic construct
  REGION 1..12: note = ATaRI peptide
RTLTVKVVGKHD

SEQ ID NO: 5521 - protein, 20 aa, synthetic construct
  REGION 1..20: note = ATaRI peptide
DRDSLPGGSRYFRGVQMMLP

SEQ ID NO: 5522 - protein, 16 aa, synthetic construct
  REGION 1..16: note = ATaRI peptide
RKQDPEWKVECVLFVF

SEQ ID NO: 5523 - protein, 17 aa, synthetic construct
  REGION 1..17: note = ATaRI peptide
SKSESSHKGKKSMYGQV

SEQ ID NO: 5524 - protein, 13 aa, synthetic construct
  REGION 1..13: note = ATaRI peptide
DYVGPLWPGKCRL

SEQ ID NO: 5525 - protein, 14 aa, synthetic construct
  REGION 1..14: note = ATaRI peptide
EIDEYIDFGLYHEH

SEQ ID NO: 5526 - protein, 10 aa, synthetic construct
  REGION 1..10: note = ATaRI peptide
GIHHRKLKVF

SEQ ID NO: 5527 - protein, 9 aa, synthetic construct
  REGION 1..9: note = ATaRI peptide
FFQNSKLLK

SEQ ID NO: 5528 - protein, 19 aa, synthetic construct
  REGION 1..19: note = ATaRI peptide
EQQADSFKGKLDFLKKQAN

SEQ ID NO: 5529 - protein, 31 aa, synthetic construct
  REGION 1..31: note = ATaRI peptide
NDFAEDSLVCCLYTGVSASYFYITSQIDTFS

SEQ ID NO: 5530 - protein, 17 aa, synthetic construct
  REGION 1..17: note = ATaRI peptide
WKNRTQEQVEINKSLVL

SEQ ID NO: 5531 - protein, 33 aa, synthetic construct
  REGION 1..33: note = ATaRI peptide
GVEVDPSLVINTAEKQESASLIFVSCSKCYYMC

SEQ ID NO: 5532 - protein, 17 aa, synthetic construct
  REGION 1..17: note = ATaRI peptide
GGQDGWKTRSEDQDHPG

SEQ ID NO: 5533 - protein, 59 aa, synthetic construct
  REGION 1..59: note = ATaRI peptide
QPAQLQGQGERAPGHTAAPSPAPRRRSRCFSSELLSQKLRLTSPPFHGSSQYLPHLPPR

SEQ ID NO: 5534 - protein, 21 aa, synthetic construct
  REGION 1..21: note = ATaRI peptide
LRERNITEVQLLGDFLGEKLI

SEQ ID NO: 5535 - protein, 10 aa, synthetic construct
  REGION 1..10: note = ATaRI peptide
DAVTGEFTVS

SEQ ID NO: 5536 - protein, 10 aa, synthetic construct
  REGION 1..10: note = ATaRI peptide
GFPSGTPAVS

SEQ ID NO: 5537 - protein, 13 aa, synthetic construct
  REGION 1..13: note = ATaRI peptide
PRPDHTKSVSLHR

SEQ ID NO: 5538 - protein, 9 aa, synthetic construct
  REGION 1..9: note = ATaRI peptide
PNIVNFLDR

SEQ ID NO: 5539 - protein, 51 aa, synthetic construct
  REGION 1..51: note = ATaRI peptide
GSAKELLQVNLKMISFGGIVDFFGNRQKAFLGLISRFHYSLITSGMAAAAI

SEQ ID NO: 5540 - protein, 25 aa, synthetic construct
  REGION 1..25: note = ATaRI peptide
IMDAVPDKVSENFLFCRRECSCVLK

SEQ ID NO: 5541 - protein, 39 aa, synthetic construct
  REGION 1..39: note = ATaRI peptide
KKKKEYKEVLRLKSLRMLFLLEVEELGIFVCCFGKEPII

SEQ ID NO: 5542 - protein, 10 aa, synthetic construct
  REGION 1..10: note = ATaRI peptide
NRPPLSDKVG

SEQ ID NO: 5543 - protein, 9 aa, synthetic construct
  REGION 1..9: note = ATaRI peptide
KRPSQLSRK

SEQ ID NO: 5544 - protein, 9 aa, synthetic construct
  REGION 1..9: note = ATaRI peptide
DVVAKRTRQ

SEQ ID NO: 5545 - protein, 9 aa, synthetic construct
  REGION 1..9: note = ATaRI peptide
NPGAVQCPV

SEQ ID NO: 5546 - protein, 25 aa, synthetic construct
  REGION 1..25: note = ATaRI peptide
DINSVGKQVKKRFLYFLGSFAEYFN

SEQ ID NO: 5547 - protein, 9 aa, synthetic construct
  REGION 1..9: note = ATaRI peptide
QALTFLNIR

SEQ ID NO: 5548 - protein, 28 aa, synthetic construct
  REGION 1..28: note = ATaRI peptide
LSSPATETGNRHKGAINHIKIIILYFFI

SEQ ID NO: 5549 - protein, 23 aa, synthetic construct
  REGION 1..23: note = ATaRI peptide
ELIDQLRKVCTLPLIYTFSVLLL

SEQ ID NO: 5550 - protein, 24 aa, synthetic construct
  REGION 1..24: note = ATaRI peptide
DGLPPFNYRYFCCCCSCSPLLGGC

SEQ ID NO: 5551 - protein, 10 aa, synthetic construct
  REGION 1..10: note = ATaRI peptide
NKRAVDFQVC

SEQ ID NO: 5552 - protein, 9 aa, synthetic construct
  REGION 1..9: note = ATaRI peptide
TLILTHFPK

SEQ ID NO: 5553 - protein, 14 aa, synthetic construct
  REGION 1..14: note = ATaRI peptide
TSQLGIQTGKFPFT

SEQ ID NO: 5554 - protein, 35 aa, synthetic construct
  REGION 1..35: note = ATaRI peptide
PAAMLGPEVSRVNLGSQLVDLFCSPGHSSCQKWGC

SEQ ID NO: 5555 - protein, 39 aa, synthetic construct
  REGION 1..39: note = ATaRI peptide
SFMEIILLVRLFFSSLSLGSGSYQGSFVGHAKLKVVDGT

SEQ ID NO: 5556 - protein, 20 aa, synthetic construct
  REGION 1..20: note = ATaRI peptide
TKSHSGVTSKLLWFSKDCCH

SEQ ID NO: 5557 - protein, 18 aa, synthetic construct
  REGION 1..18: note = ATaRI peptide
VHACEGCKVKHAFVSLSY

SEQ ID NO: 5558 - protein, 9 aa, synthetic construct
  REGION 1..9: note = ATaRI peptide
VAIVFSKKR

SEQ ID NO: 5559 - protein, 38 aa, synthetic construct
  REGION 1..38: note = ATaRI peptide
TVPRQNREVGESCIHSRPFCNENLTLDSLHLPLPRYLL

SEQ ID NO: 5560 - protein, 35 aa, synthetic construct
  REGION 1..35: note = ATaRI peptide
ASPVSTYQVCPIYLHLRRYLSCSNTVFRGKKDTVE

SEQ ID NO: 5561 - protein, 15 aa, synthetic construct
  REGION 1..15: note = ATaRI peptide
KHGTITARVSQKFDR

SEQ ID NO: 5562 - protein, 13 aa, synthetic construct
  REGION 1..13: note = ATaRI peptide
IQVQTQPRGIFDK

SEQ ID NO: 5563 - protein, 24 aa, synthetic construct
  REGION 1..24: note = ATaRI peptide
TSEHMAAAGMKNIYFPSSKEYVDV

SEQ ID NO: 5564 - protein, 14 aa, synthetic construct
  REGION 1..14: note = ATaRI peptide
SVIYLTYTGTCYHL

SEQ ID NO: 5565 - protein, 9 aa, synthetic construct
  REGION 1..9: note = ATaRI peptide
RFYSLWDTG

SEQ ID NO: 5566 - protein, 13 aa, synthetic construct
  REGION 1..13: note = ATaRI peptide
NQGNLYDKVGNLK

SEQ ID NO: 5567 - protein, 9 aa, synthetic construct
  REGION 1..9: note = ATaRI peptide
VLASYNHDG

SEQ ID NO: 5568 - protein, 10 aa, synthetic construct
  REGION 1..10: note = ATaRI peptide
YYRFGEMQVS

SEQ ID NO: 5569 - protein, 67 aa, synthetic construct
  REGION 1..67: note = ATaRI peptide
GHKLPENVVRLWGEMYIGSFCKLCLAEQHLGFGTGKAASLFPSSFPLPIGWLVLVFLTLKMGFLLCC

SEQ ID NO: 5570 - protein, 9 aa, synthetic construct
  REGION 1..9: note = ATaRI peptide
LKQKGLLDK

SEQ ID NO: 5571 - protein, 12 aa, synthetic construct
  REGION 1..12: note = ATaRI peptide
TLNQLKNQVIHK

SEQ ID NO: 5572 - protein, 33 aa, synthetic construct
  REGION 1..33: note = ATaRI peptide
LYQFIEPFGMLSVKSKISLSSLYLQNSLVLLPR

SEQ ID NO: 5573 - protein, 36 aa, synthetic construct
  REGION 1..36: note = ATaRI peptide
SVMNTAGNVSFFWTFVFQFVSFLFRLWVLSGLNNLS

SEQ ID NO: 5574 - protein, 30 aa, synthetic construct
  REGION 1..30: note = ATaRI peptide
DLLCLALSGICISDLGKLGFHYLQCIYLIG

SEQ ID NO: 5575 - protein, 18 aa, synthetic construct
  REGION 1..18: note = ATaRI peptide
VFFLKATRGNSNLSFCCM

SEQ ID NO: 5576 - protein, 9 aa, synthetic construct
  REGION 1..9: note = ATaRI peptide
REATTLANG

SEQ ID NO: 5577 - protein, 13 aa, synthetic construct
  REGION 1..13: note = ATaRI peptide
AKTMQGSEVRRTL

SEQ ID NO: 5578 - protein, 30 aa, synthetic construct
  REGION 1..30: note = ATaRI peptide
TPAPRTMPVSRQINILNRGFTLTMITCSNG

SEQ ID NO: 5579 - protein, 10 aa, synthetic construct
  REGION 1..10: note = ATaRI peptide
STYGFRGEVS

SEQ ID NO: 5580 - protein, 36 aa, synthetic construct
  REGION 1..36: note = ATaRI peptide
GKILEVVGRYSPKSGSGSLRFVIKVMCSSAHTLNSC

SEQ ID NO: 5581 - protein, 81 aa, synthetic construct
  REGION 1..81: note = ATaRI peptide
SIFGNAVSRYVDNLYKKIFYIYYLGLSFHHIILEPFKILCVLRVCFSQIHRLVLCFRFVNGVLISRNQHFLGVCNLLDSVA

SEQ ID NO: 5582 - protein, 9 aa, synthetic construct
  REGION 1..9: note = ATaRI peptide
NTHPFLYLR

SEQ ID NO: 5583 - protein, 9 aa, synthetic construct
  REGION 1..9: note = ATaRI peptide
YLLNTTKLR

SEQ ID NO: 5584 - protein, 11 aa, synthetic construct
  REGION 1..11: note = ATaRI peptide
ESTLSGQQVQW

SEQ ID NO: 5585 - protein, 11 aa, synthetic construct
  REGION 1..11: note = ATaRI peptide
YISVLQTQVKE

SEQ ID NO: 5586 - protein, 42 aa, synthetic construct
  REGION 1..42: note = ATaRI peptide
QKEKSERAGKNLRVTCFMLELKSYLKCLTSIFKNELNIDKNS

SEQ ID NO: 5587 - protein, 19 aa, synthetic construct
  REGION 1..19: note = ATaRI peptide
QEAETYRTVSFNNIQILEL

SEQ ID NO: 5588 - protein, 9 aa, synthetic construct
  REGION 1..9: note = ATaRI peptide
DQEREEKIK

SEQ ID NO: 5589 - protein, 12 aa, synthetic construct
  REGION 1..12: note = ATaRI peptide
EENPGNDNVRGV

SEQ ID NO: 5590 - protein, 11 aa, synthetic construct
  REGION 1..11: note = ATaRI peptide
KEQEFREQVQA

SEQ ID NO: 5591 - protein, 23 aa, synthetic construct
  REGION 1..23: note = ATaRI peptide
MNRRYTYLGEYSGREQVRKGKWE

SEQ ID NO: 5592 - protein, 64 aa, synthetic construct
  REGION 1..64: note = ATaRI peptide
PQDKGIGKVRRNICGIAGVRQKRGACCPWCRGLPADIDLNILLGGWWGGDEEPPDCPTPLESFP

SEQ ID NO: 5593 - protein, 13 aa, synthetic construct
  REGION 1..13: note = ATaRI peptide
IFQASGKKVRFLV

SEQ ID NO: 5594 - protein, 64 aa, synthetic construct
  REGION 1..64: note = ATaRI peptide
LFTASLAKVSPASQPHTPSLVLPAPPPLPPICQAALCFGGGSHFYGDRFPPQMGWMQAMCMVPV

SEQ ID NO: 5595 - protein, 27 aa, synthetic construct
  REGION 1..27: note = ATaRI peptide
MLLDTWQEVRWPSLPGGAVNGGVFLFV

SEQ ID NO: 5596 - protein, 10 aa, synthetic construct
  REGION 1..10: note = ATaRI peptide
LVMKLLSGGE

SEQ ID NO: 5597 - protein, 23 aa, synthetic construct
  REGION 1..23: note = ATaRI peptide
MAPEVMEQVPCLFFCFKWVRALF

SEQ ID NO: 5598 - protein, 14 aa, synthetic construct
  REGION 1..14: note = ATaRI peptide
HKFFQKAKVGNSSF

SEQ ID NO: 5599 - protein, 21 aa, synthetic construct
  REGION 1..21: note = ATaRI peptide
AEPAKTAQVKPGIWFHGHSFG

SEQ ID NO: 5600 - protein, 9 aa, synthetic construct
  REGION 1..9: note = ATaRI peptide
PISLVLRLR

SEQ ID NO: 5601 - protein, 36 aa, synthetic construct
  REGION 1..36: note = ATaRI peptide
VDGRDLVIGNSIAFCSCAPVSLSVYLVHRKAGFLFH

SEQ ID NO: 5602 - protein, 26 aa, synthetic construct
  REGION 1..26: note = ATaRI peptide
GWDFSTQQVQSPGRRATGPPPPLRWG

SEQ ID NO: 5603 - protein, 18 aa, synthetic construct
  REGION 1..18: note = ATaRI peptide
LALSGAGQVRLQQTLSAM

SEQ ID NO: 5604 - protein, 10 aa, synthetic construct
  REGION 1..10: note = ATaRI peptide
PEAYSHTEVG

SEQ ID NO: 5605 - protein, 60 aa, synthetic construct
  REGION 1..60: note = ATaRI peptide
YSPIDYSDGEPRGMGWVPGQCACGMWVCKQWEPHLPRVGANLVALSSVARKEVYSLSFTT

SEQ ID NO: 5606 - protein, 12 aa, synthetic construct
  REGION 1..12: note = ATaRI peptide
PWISEGRPGGLH

SEQ ID NO: 5607 - protein, 22 aa, synthetic construct
  REGION 1..22: note = ATaRI peptide
RFNTENHKVHVLLVLELHWLHL

SEQ ID NO: 5608 - protein, 27 aa, synthetic construct
  REGION 1..27: note = ATaRI peptide
GSAYRAFHGRLMEGDSYLWKWPGHGVG

SEQ ID NO: 5609 - protein, 29 aa, synthetic construct
  REGION 1..29: note = ATaRI peptide
IWSVNQHKVMQGLKSVPSKFWTNGFYCLI

SEQ ID NO: 5610 - protein, 22 aa, synthetic construct
  REGION 1..22: note = ATaRI peptide
TASNNTVTSKVFKRNFFESDPS

SEQ ID NO: 5611 - protein, 17 aa, synthetic construct
  REGION 1..17: note = ATaRI peptide
LLNRDGTQVCSFIWVFT

SEQ ID NO: 5612 - protein, 25 aa, synthetic construct
  REGION 1..25: note = ATaRI peptide
QAVTLIFKVRLQNKYWFLWCLRISF

SEQ ID NO: 5613 - protein, 32 aa, synthetic construct
  REGION 1..32: note = ATaRI peptide
WYYEECSDGNYGPCKTEPGCIGVLSPSGWGVS

SEQ ID NO: 5614 - protein, 43 aa, synthetic construct
  REGION 1..43: note = ATaRI peptide
EEAESPDITYGHSFYSFEIPRDQLGPVQCSKPSNVEALGTDSD

SEQ ID NO: 5615 - protein, 9 aa, synthetic construct
  REGION 1..9: note = ATaRI peptide
DELTRVTPR

SEQ ID NO: 5616 - protein, 20 aa, synthetic construct
  REGION 1..20: note = ATaRI peptide
GLRIAGPFGECLCSRKAKCL

SEQ ID NO: 5617 - protein, 9 aa, synthetic construct
  REGION 1..9: note = ATaRI peptide
YHCNVQTPR

SEQ ID NO: 5618 - protein, 49 aa, synthetic construct
  REGION 1..49: note = ATaRI peptide
GQEPFSTSGTFFISGVSLASLMLNVFINFDIARIPLDENFGDRKIIAFN

SEQ ID NO: 5619 - protein, 9 aa, synthetic construct
  REGION 1..9: note = ATaRI peptide
HQLQLSDIR

SEQ ID NO: 5620 - protein, 61 aa, synthetic construct
  REGION 1..61: note = ATaRI peptide
DVHHHWTKVRKSLKIKNSLSFINFHFQQCCNVKGLKKGLLCFCFCFLMFLIAVSAVFRSDA

SEQ ID NO: 5621 - protein, 9 aa, synthetic construct
  REGION 1..9: note = ATaRI peptide
RENMKRKEE

SEQ ID NO: 5622 - protein, 36 aa, synthetic construct
  REGION 1..36: note = ATaRI peptide
GYLEFFVDWSVLSMQIFLKINDFKDEDSENEPLVCC

SEQ ID NO: 5623 - protein, 48 aa, synthetic construct
  REGION 1..48: note = ATaRI peptide
WVLYVDVLVSIIVLYWPHSTFVGKTSWPIFLPVLFSSSGGCFQLIGWD

SEQ ID NO: 5624 - protein, 27 aa, synthetic construct
  REGION 1..27: note = ATaRI peptide
QREEVDLTGKNGPSGPIQVLPESQGQA

SEQ ID NO: 5625 - protein, 15 aa, synthetic construct
  REGION 1..15: note = ATaRI peptide
KDILWDVKSKSPSSS

SEQ ID NO: 5626 - protein, 87 aa, synthetic construct
  REGION 1..87: note = ATaRI peptide
YKNSVISQVRNSPIPGVNSVTKHSLGTFACGLCCPPCLGLGHCGSSFLAMAVLLALIDWPYCFGYFTKVDQQCICSNGKRCPQEMAL

SEQ ID NO: 5627 - protein, 61 aa, synthetic construct
  REGION 1..61: note = ATaRI peptide
MGLSNALSVSGLSSFAGSRGGRERCGKGPHRVPRGTESTPTVSPPQCGLIILRKHFSIVTT

SEQ ID NO: 5628 - protein, 41 aa, synthetic construct
  REGION 1..41: note = ATaRI peptide
EVVQMAVLVSISPQPQNPAVPALLVAPKYCGGFERSISRPF

SEQ ID NO: 5629 - protein, 98 aa, synthetic construct
  REGION 1..98: note = ATaRI peptide
VFCEEDFLVSVSPKPPLACPGQSQRAGAWGDLGQRVGKLHCWREGPCLSFCRYLGVAMFLRPMANHTALYFEGTVGSLGYPLAAFCSSASSTTLDSSS

SEQ ID NO: 5630 - protein, 9 aa, synthetic construct
  REGION 1..9: note = ATaRI peptide
IYCVRDYHK

SEQ ID NO: 5631 - protein, 12 aa, synthetic construct
  REGION 1..12: note = ATaRI peptide
LGTIHLVAGKRK

SEQ ID NO: 5632 - protein, 20 aa, synthetic construct
  REGION 1..20: note = ATaRI peptide
AGVRYYVRGENFVSMGHICN

SEQ ID NO: 5633 - protein, 26 aa, synthetic construct
  REGION 1..26: note = ATaRI peptide
IQYGNVIQVGQGSSSLLKLKRYKECS

SEQ ID NO: 5634 - protein, 25 aa, synthetic construct
  REGION 1..25: note = ATaRI peptide
KLRSIGDSVSADSPPRKSSVPCFQA

SEQ ID NO: 5635 - protein, 20 aa, synthetic construct
  REGION 1..20: note = ATaRI peptide
TGHYLAAEVSSSSCGFLFQG

SEQ ID NO: 5636 - protein, 30 aa, synthetic construct
  REGION 1..30: note = ATaRI peptide
QQDYRKNQVWIKHWWDVVVSFLPEVCELSS

SEQ ID NO: 5637 - protein, 9 aa, synthetic construct
  REGION 1..9: note = ATaRI peptide
LVRKNREPR

SEQ ID NO: 5638 - protein, 38 aa, synthetic construct
  REGION 1..38: note = ATaRI peptide
QAEGIFGGRKVYFQLLFCREGCSSRALRGLPFIMLVNI

SEQ ID NO: 5639 - protein, 61 aa, synthetic construct
  REGION 1..61: note = ATaRI peptide
LLQIPYEKVSGASCTAAALRMGRIPGFPQTLHIWILLVKKCIQCDYCDYKAISGIDMKQSI

SEQ ID NO: 5640 - protein, 60 aa, synthetic construct
  REGION 1..60: note = ATaRI peptide
INLFLNPGVRLEANLQIYRGRRAGKREEEQLVLWLLWLLGLVIMQHSFQRGTFSSLITRT

SEQ ID NO: 5641 - protein, 44 aa, synthetic construct
  REGION 1..44: note = ATaRI peptide
THEDCIPEVSEPSLAVPFSLLCGVCCRGSLGDMVVAGLGEPSWL

SEQ ID NO: 5642 - protein, 41 aa, synthetic construct
  REGION 1..41: note = ATaRI peptide
NFLVDICRVRLLELRRQSWRVRGVCVCVCVCVCVCSIFVHT

SEQ ID NO: 5643 - protein, 30 aa, synthetic construct
  REGION 1..30: note = ATaRI peptide
QEFSAFFQGQAPPLPPLGSTPKPRPLPVVP

SEQ ID NO: 5644 - protein, 23 aa, synthetic construct
  REGION 1..23: note = ATaRI peptide
TRLIQNSKVGRAQPGGEGLEARG

SEQ ID NO: 5645 - protein, 13 aa, synthetic construct
  REGION 1..13: note = ATaRI peptide
LTEPDVQKVPSWG

SEQ ID NO: 5646 - protein, 18 aa, synthetic construct
  REGION 1..18: note = ATaRI peptide
CIRVLSDVGKIPSQFGYT

SEQ ID NO: 5647 - protein, 10 aa, synthetic construct
  REGION 1..10: note = ATaRI peptide
IVMQGMDPRY

SEQ ID NO: 5648 - protein, 9 aa, synthetic construct
  REGION 1..9: note = ATaRI peptide
ACCTFLRER

SEQ ID NO: 5649 - protein, 18 aa, synthetic construct
  REGION 1..18: note = ATaRI peptide
LNVKSEEQVCEPSSSLCR

SEQ ID NO: 5650 - protein, 24 aa, synthetic construct
  REGION 1..24: note = ATaRI peptide
AVGGLNSAGTLRLPFIDPPLGLHG

SEQ ID NO: 5651 - protein, 45 aa, synthetic construct
  REGION 1..45: note = ATaRI peptide
QGPCHENQVIKFLFWDGEKKCPILEMLIETSSEITKPVPVGLGSQ

SEQ ID NO: 5652 - protein, 31 aa, synthetic construct
  REGION 1..31: note = ATaRI peptide
HTNGPKKKVTLLVARKNIGMTQKGGCLSFLS

SEQ ID NO: 5653 - protein, 96 aa, synthetic construct
  REGION 1..96: note = ATaRI peptide
HEFFYSLLVSTWCGNILCVGKLGECPMSSLSSQTLPFNGDWCAWSTKIEAPQLAAFGGSERKAPQELGQPRNSRVTQPHCVLGTPDLLLLSNGTCL

SEQ ID NO: 5654 - protein, 34 aa, synthetic construct
  REGION 1..34: note = ATaRI peptide
YLFRDYVEVWPAFVLPSVFPGLPSIRGSPQLLTL

SEQ ID NO: 5655 - protein, 21 aa, synthetic construct
  REGION 1..21: note = ATaRI peptide
DVVPRQLGGKAYLAGWVQWGL

SEQ ID NO: 5656 - protein, 154 aa, synthetic construct
  REGION 1..154: note = ATaRI peptide
VHATVYSQVCWYCSCPFPTSLSGHGSSKIVPGPLMPPPSQASGTHMSLPTLQTPSPHAMSPVPLMLCGLRKRSFWTSSSPHRPVLRGTNSVCLPPLLPPPPSFLAPVLLSQCIRGSAVFPGGTLHHLCLPLSDSLPPEATGLFPTHSFTCSFIQ

SEQ ID NO: 5657 - protein, 10 aa, synthetic construct
  REGION 1..10: note = ATaRI peptide
RDAQRDLQVC

SEQ ID NO: 5658 - protein, 62 aa, synthetic construct
  REGION 1..62: note = ATaRI peptide
QQLSDLHKVLGEGAMPFQTVDSWPGFVAHACNPSTLGGRGGWIAWAQKYKTSLGNMVKPPLY

SEQ ID NO: 5659 - protein, 17 aa, synthetic construct
  REGION 1..17: note = ATaRI peptide
YLERREREVNFGDLLLP

SEQ ID NO: 5660 - protein, 48 aa, synthetic construct
  REGION 1..48: note = ATaRI peptide
FIPRPETEVGVPPGQGRIRMMVEFRAPVLPQASSRGHWGPMTSGTVPF

SEQ ID NO: 5661 - protein, 80 aa, synthetic construct
  REGION 1..80: note = ATaRI peptide
IIHLDMTSGTLPCMFLERGRLDAGAAGWMRHSVEMEGELPQQPHSHTQHTHIHVCVCTFVAAQTKPWLRTDKVLLPPRLT

SEQ ID NO: 5662 - protein, 10 aa, synthetic construct
  REGION 1..10: note = ATaRI peptide
EQLAPEIRRC

SEQ ID NO: 5663 - protein, 32 aa, synthetic construct
  REGION 1..32: note = ATaRI peptide
RCLLIIMEWYAGLPCLHTPSASLWPSGSLPRF

SEQ ID NO: 5664 - protein, 29 aa, synthetic construct
  REGION 1..29: note = ATaRI peptide
NIAHRDVKVRLQDSGWGPGEEDIVPLHNP

SEQ ID NO: 5665 - protein, 16 aa, synthetic construct
  REGION 1..16: note = ATaRI peptide
PCYTPYYVGESFGHEL

SEQ ID NO: 5666 - protein, 9 aa, synthetic construct
  REGION 1..9: note = ATaRI peptide
PSHMRRNIR

SEQ ID NO: 5667 - protein, 59 aa, synthetic construct
  REGION 1..59: note = ATaRI peptide
ARAVKPHQVQQTLTVFSFSFLFPCCEHCLLVVISVTACEVLVWYQEQLVQLLERPDTSF

SEQ ID NO: 5668 - protein, 9 aa, synthetic construct
  REGION 1..9: note = ATaRI peptide
VHILNDEHK

SEQ ID NO: 5669 - protein, 9 aa, synthetic construct
  REGION 1..9: note = ATaRI peptide
LGDKILVFR

SEQ ID NO: 5670 - protein, 54 aa, synthetic construct
  REGION 1..54: note = ATaRI peptide
WVRNISYFREFIVALFLKPWQGLLKGFLSFSLFLFLHSIKCIGIFVISQGAGGY

SEQ ID NO: 5671 - protein, 9 aa, synthetic construct
  REGION 1..9: note = ATaRI peptide
IPAFSQRNW

SEQ ID NO: 5672 - protein, 21 aa, synthetic construct
  REGION 1..21: note = ATaRI peptide
IHIIRGTKGKSLTKDLFPAFG

SEQ ID NO: 5673 - protein, 9 aa, synthetic construct
  REGION 1..9: note = ATaRI peptide
VQVFEATIR

SEQ ID NO: 5674 - protein, 66 aa, synthetic construct
  REGION 1..66: note = ATaRI peptide
RSNDTGLLGVAPFLAIGTAHCLVPFSFHLLWALPPFYSSTQLTTQQELCQLYLISLCDPLQRGCMV

SEQ ID NO: 5675 - protein, 51 aa, synthetic construct
  REGION 1..51: note = ATaRI peptide
SIQNYLRRGYVSLTSPLLPCKANRMHSEAFVFFLTHNHRVCLSLPSPYHLS

SEQ ID NO: 5676 - protein, 34 aa, synthetic construct
  REGION 1..34: note = ATaRI peptide
ESTYLLYQVLELCFFFFPFTASPDPSSSFLMNIC

SEQ ID NO: 5677 - protein, 12 aa, synthetic construct
  REGION 1..12: note = ATaRI peptide
SLEKYTKVKSVF

SEQ ID NO: 5678 - protein, 15 aa, synthetic construct
  REGION 1..15: note = ATaRI peptide
KVINSSSNVSCFFQG

SEQ ID NO: 5679 - protein, 17 aa, synthetic construct
  REGION 1..17: note = ATaRI peptide
MDIISGTLGMYTLYYIH

SEQ ID NO: 5680 - protein, 49 aa, synthetic construct
  REGION 1..49: note = ATaRI peptide
DLDKFTPRGQCSGGLCEWVPVGISKQAFGLRETAFSWLWAPASLTVERG

SEQ ID NO: 5681 - protein, 20 aa, synthetic construct
  REGION 1..20: note = ATaRI peptide
DTISFDFKVWAQPGPGQVTG

SEQ ID NO: 5682 - protein, 9 aa, synthetic construct
  REGION 1..9: note = ATaRI peptide
EKKECQRLR

SEQ ID NO: 5683 - protein, 69 aa, synthetic construct
  REGION 1..69: note = ATaRI peptide
RYFSEPLQGRHRACWGSGAWSVWLGQAWGVILWSQLCGFRQQSATWLQWAESSLSEEGSCHEGGVHGQM

SEQ ID NO: 5684 - protein, 9 aa, synthetic construct
  REGION 1..9: note = ATaRI peptide
SARGPGDLL

SEQ ID NO: 5685 - protein, 41 aa, synthetic construct
  REGION 1..41: note = ATaRI peptide
NNGKAEFWVRGARAVPCVCVCVSVCVCMRACVCVHTRGLGQ

SEQ ID NO: 5686 - protein, 92 aa, synthetic construct
  REGION 1..92: note = ATaRI peptide
NKQGYKCRRKCLHRPVCTYVPMCAHVCQCLCVCQCLCALRECMHVSFPSVDTAAEFSECWGWLAAALENQFCASLPSSAFSDGELVDGNWAQ

SEQ ID NO: 5687 - protein, 29 aa, synthetic construct
  REGION 1..29: note = ATaRI peptide
LHSKGIIYRCGGEGSGGSWEGRLQPHHIF

SEQ ID NO: 5688 - protein, 62 aa, synthetic construct
  REGION 1..62: note = ATaRI peptide
EPPFRPKVVCDPALCCLQAELLLSCPPSLLHHSHAFHLSLLPAISIACSVTAAALVFSSSPS

SEQ ID NO: 5689 - protein, 11 aa, synthetic construct
  REGION 1..11: note = ATaRI peptide
MHRIYDAQVKH

SEQ ID NO: 5690 - protein, 36 aa, synthetic construct
  REGION 1..36: note = ATaRI peptide
LLGYMQAQVNTVLYLDYNCPKSFILSLIFTLSIRVL

SEQ ID NO: 5691 - protein, 18 aa, synthetic construct
  REGION 1..18: note = ATaRI peptide
IYLSENPEVIFLFYVTQI

SEQ ID NO: 5692 - protein, 11 aa, synthetic construct
  REGION 1..11: note = ATaRI peptide
PLPSPVDKVSC

SEQ ID NO: 5693 - protein, 17 aa, synthetic construct
  REGION 1..17: note = ATaRI peptide
NQLQACSKVGINLKCVK

SEQ ID NO: 5694 - protein, 14 aa, synthetic construct
  REGION 1..14: note = ATaRI peptide
KDLSDKLKVCIYSA

SEQ ID NO: 5695 - protein, 25 aa, synthetic construct
  REGION 1..25: note = ATaRI peptide
LLREKGNNVSLCKLGLALIERHMRD

SEQ ID NO: 5696 - protein, 10 aa, synthetic construct
  REGION 1..10: note = ATaRI peptide
PKVTGLHKVR

SEQ ID NO: 5697 - protein, 20 aa, synthetic construct
  REGION 1..20: note = ATaRI peptide
PFVVQVGEGECWAAGHMCFS

SEQ ID NO: 5698 - protein, 9 aa, synthetic construct
  REGION 1..9: note = ATaRI peptide
YADEEIPRR

SEQ ID NO: 5699 - protein, 36 aa, synthetic construct
  REGION 1..36: note = ATaRI peptide
VSYIAQEPGMYSGFTRGHFPCLNMIRLQGTEIHQVC

SEQ ID NO: 5700 - protein, 23 aa, synthetic construct
  REGION 1..23: note = ATaRI peptide
RLTVMSLQVRCKEASISLAAGHQ

SEQ ID NO: 5701 - protein, 9 aa, synthetic construct
  REGION 1..9: note = ATaRI peptide
RPGSSLCYR

SEQ ID NO: 5702 - protein, 36 aa, synthetic construct
  REGION 1..36: note = ATaRI peptide
DMWLSVVKVQFSILLSYKKRELGAVAHAYNPSTLGA

SEQ ID NO: 5703 - protein, 27 aa, synthetic construct
  REGION 1..27: note = ATaRI peptide
GQVKRIHQVSRRLYQRLPRLSQPPLHV

SEQ ID NO: 5704 - protein, 11 aa, synthetic construct
  REGION 1..11: note = ATaRI peptide
SLCLVCPAGKL

SEQ ID NO: 5705 - protein, 67 aa, synthetic construct
  REGION 1..67: note = ATaRI peptide
VRFKVPQQVTWLQQRHNYPPQRPGGEYQLPARIPSFTYSLTTSCPLLHIFSKCLCSACNTLGTVLVQ

SEQ ID NO: 5706 - protein, 29 aa, synthetic construct
  REGION 1..29: note = ATaRI peptide
IIWGKQDQVCNTSPRQSVLVTRASEEKRP

SEQ ID NO: 5707 - protein, 18 aa, synthetic construct
  REGION 1..18: note = ATaRI peptide
ISVENSWQVSIFFFFFVN

SEQ ID NO: 5708 - protein, 49 aa, synthetic construct
  REGION 1..49: note = ATaRI peptide
IKLLPSCLVSIRLSFILSADDRVTVFFLGEHGQKSWKTEWGDTVDFRSD

SEQ ID NO: 5709 - protein, 9 aa, synthetic construct
  REGION 1..9: note = ATaRI peptide
TISRLLQMP

SEQ ID NO: 5710 - protein, 12 aa, synthetic construct
  REGION 1..12: note = ATaRI peptide
KYSNSNNSGNWL

SEQ ID NO: 5711 - protein, 9 aa, synthetic construct
  REGION 1..9: note = ATaRI peptide
GLSKRCKER

SEQ ID NO: 5712 - protein, 9 aa, synthetic construct
  REGION 1..9: note = ATaRI peptide
TKDSDKDLV

SEQ ID NO: 5713 - protein, 9 aa, synthetic construct
  REGION 1..9: note = ATaRI peptide
GRGSWQRWW

SEQ ID NO: 5714 - protein, 44 aa, synthetic construct
  REGION 1..44: note = ATaRI peptide
AAIGSFPNGKKLYSHFCKAKIRWDFQNGVWSYPHRIPCVLKLIF

SEQ ID NO: 5715 - protein, 15 aa, synthetic construct
  REGION 1..15: note = ATaRI peptide
FPLWESLKVSFSVFT

SEQ ID NO: 5716 - protein, 25 aa, synthetic construct
  REGION 1..25: note = ATaRI peptide
EQLKKSQVVSICSLEPKQLFSVCYS

SEQ ID NO: 5717 - protein, 43 aa, synthetic construct
  REGION 1..43: note = ATaRI peptide
SAVCGAFAGAKDYIILGKTKEGEKCENINYAKTTFFRHSRLFR

SEQ ID NO: 5718 - protein, 9 aa, synthetic construct
  REGION 1..9: note = ATaRI peptide
VWRSQGLAG

SEQ ID NO: 5719 - protein, 15 aa, synthetic construct
  REGION 1..15: note = ATaRI peptide
HSRASCMQVLNDLAA

SEQ ID NO: 5720 - protein, 32 aa, synthetic construct
  REGION 1..32: note = ATaRI peptide
PNIKRELTGKHLVNVPLTADFCPFPDKTKLLI

SEQ ID NO: 5721 - protein, 34 aa, synthetic construct
  REGION 1..34: note = ATaRI peptide
QKKDNHNLSKLVLFMFMTFDINVPHISKMFPEIL

SEQ ID NO: 5722 - protein, 36 aa, synthetic construct
  REGION 1..36: note = ATaRI peptide
NIIFYFNPGRLSLENAFCVGVHSAHPTEHIPCPGCY

SEQ ID NO: 5723 - protein, 34 aa, synthetic construct
  REGION 1..34: note = ATaRI peptide
ALYEAIRDVSVPLLLLADVLISMKQYWRFSHLSL

SEQ ID NO: 5724 - protein, 21 aa, synthetic construct
  REGION 1..21: note = ATaRI peptide
KFLRGVEKVFILLLELYYAVV

SEQ ID NO: 5725 - protein, 31 aa, synthetic construct
  REGION 1..31: note = ATaRI peptide
LEKQEKQLVSRTLNFSLTFQTNLEITVGIIS

SEQ ID NO: 5726 - protein, 28 aa, synthetic construct
  REGION 1..28: note = ATaRI peptide
WISYPSHGVSSINYHKETFSLLPVLGSR

SEQ ID NO: 5727 - protein, 24 aa, synthetic construct
  REGION 1..24: note = ATaRI peptide
VSITTNQAGEYILDASYSYHITSE

SEQ ID NO: 5728 - protein, 26 aa, synthetic construct
  REGION 1..26: note = ATaRI peptide
YEVKYYEKVGKQCLRVGLCRQEAVSS

SEQ ID NO: 5729 - protein, 31 aa, synthetic construct
  REGION 1..31: note = ATaRI peptide
SIDKVVGAGNHNDPTANLVLYVNHDCSVSET

SEQ ID NO: 5730 - protein, 10 aa, synthetic construct
  REGION 1..10: note = ATaRI peptide
RLEGVVTKSK

SEQ ID NO: 5731 - protein, 30 aa, synthetic construct
  REGION 1..30: note = ATaRI peptide
PEAAYTTRVSNLDFLLFYHCFPSCIMLICK

SEQ ID NO: 5732 - protein, 9 aa, synthetic construct
  REGION 1..9: note = ATaRI peptide
KIITSAAAR

SEQ ID NO: 5733 - protein, 9 aa, synthetic construct
  REGION 1..9: note = ATaRI peptide
DTIAKISTE

SEQ ID NO: 5734 - protein, 24 aa, synthetic construct
  REGION 1..24: note = ATaRI peptide
ATAKGIQGGKLKTFMCFLNSIKLF

SEQ ID NO: 5735 - protein, 9 aa, synthetic construct
  REGION 1..9: note = ATaRI peptide
KSKLTFGDG

SEQ ID NO: 5736 - protein, 9 aa, synthetic construct
  REGION 1..9: note = ATaRI peptide
PIASVIIEV

SEQ ID NO: 5737 - protein, 14 aa, synthetic construct
  REGION 1..14: note = ATaRI peptide
RRKQDNISGERKMG

SEQ ID NO: 5738 - protein, 17 aa, synthetic construct
  REGION 1..17: note = ATaRI peptide
TVIGSQMQVSTKGLRTL

SEQ ID NO: 5739 - protein, 9 aa, synthetic construct
  REGION 1..9: note = ATaRI peptide
EVNGHFFKK

SEQ ID NO: 5740 - protein, 34 aa, synthetic construct
  REGION 1..34: note = ATaRI peptide
GTFSSCKKVCLCFCVCVVFMCVCFIFLSLRFLSS

SEQ ID NO: 5741 - protein, 9 aa, synthetic construct
  REGION 1..9: note = ATaRI peptide
PQENISSRW

SEQ ID NO: 5742 - protein, 68 aa, synthetic construct
  REGION 1..68: note = ATaRI peptide
VTEEDCALRSVLGCCGQGLVLGMGCLARDGHVHIVRGYLSLVQVSGLASSSSVCQVCAPEIWLLKSTG

SEQ ID NO: 5743 - protein, 9 aa, synthetic construct
  REGION 1..9: note = ATaRI peptide
NKKVKFGMK

SEQ ID NO: 5744 - protein, 9 aa, synthetic construct
  REGION 1..9: note = ATaRI peptide
GLIFNWKQV

SEQ ID NO: 5745 - protein, 9 aa, synthetic construct
  REGION 1..9: note = ATaRI peptide
EFSALKTQR

SEQ ID NO: 5746 - protein, 30 aa, synthetic construct
  REGION 1..30: note = ATaRI peptide
TPANFLLPVRPPLPCSSGKLVKQGSLARER

SEQ ID NO: 5747 - protein, 51 aa, synthetic construct
  REGION 1..51: note = ATaRI peptide
ILPGVGTKVRPQGVGAALSTDTKRRAGNEPSLGAGWRLGFRRQSRKEKGYK

SEQ ID NO: 5748 - protein, 32 aa, synthetic construct
  REGION 1..32: note = ATaRI peptide
INKLKPSNVSIFVRCFMYFLLLKKINVQNYVI

SEQ ID NO: 5749 - protein, 9 aa, synthetic construct
  REGION 1..9: note = ATaRI peptide
RNLWEHYYK

SEQ ID NO: 5750 - protein, 37 aa, synthetic construct
  REGION 1..37: note = ATaRI peptide
LDTLLNHPGMCVSFSLYLFFGVHLCVMFCSLGIAYTM

SEQ ID NO: 5751 - protein, 24 aa, synthetic construct
  REGION 1..24: note = ATaRI peptide
GSLKRVLKVTTVDFSIFYLILFII

SEQ ID NO: 5752 - protein, 19 aa, synthetic construct
  REGION 1..19: note = ATaRI peptide
VSFTVKSGVYVSVPFYYSD

SEQ ID NO: 5753 - protein, 45 aa, synthetic construct
  REGION 1..45: note = ATaRI peptide
KSLHPLQMVSKFKKKHSFSQVPMNPKLNNHDVCSCISISSEYVYY

SEQ ID NO: 5754 - protein, 9 aa, synthetic construct
  REGION 1..9: note = ATaRI peptide
GSIRVIGGV

SEQ ID NO: 5755 - protein, 9 aa, synthetic construct
  REGION 1..9: note = ATaRI peptide
CSFKVLRGW

SEQ ID NO: 5756 - protein, 14 aa, synthetic construct
  REGION 1..14: note = ATaRI peptide
GSLRPMKQVRRKEP

SEQ ID NO: 5757 - protein, 17 aa, synthetic construct
  REGION 1..17: note = ATaRI peptide
VVPPSPMTGMFVPFTHL

SEQ ID NO: 5758 - protein, 48 aa, synthetic construct
  REGION 1..48: note = ATaRI peptide
EAVPKKGKGNIILPGCYKTTAFQISKLWDQRGKINFRSFSFRICYWHF

SEQ ID NO: 5759 - protein, 27 aa, synthetic construct
  REGION 1..27: note = ATaRI peptide
VIQSIIFKGSVAKPCLFYFYLFFFFCN

SEQ ID NO: 5760 - protein, 17 aa, synthetic construct
  REGION 1..17: note = ATaRI peptide
LPTEIPCEVSKDTLLFK

SEQ ID NO: 5761 - protein, 10 aa, synthetic construct
  REGION 1..10: note = ATaRI peptide
DSGESLCQVS

SEQ ID NO: 5762 - protein, 26 aa, synthetic construct
  REGION 1..26: note = ATaRI peptide
TEICSQNKCEYFPAASIILFITFHSM

SEQ ID NO: 5763 - protein, 20 aa, synthetic construct
  REGION 1..20: note = ATaRI peptide
FCGLPKKQGTNTNFNLFSNL

SEQ ID NO: 5764 - protein, 10 aa, synthetic construct
  REGION 1..10: note = ATaRI peptide
RPEEENVYSK

SEQ ID NO: 5765 - protein, 31 aa, synthetic construct
  REGION 1..31: note = ATaRI peptide
LTIVHHPGGKCLVFIEGSKTKTKYRVNQFQY

SEQ ID NO: 5766 - protein, 33 aa, synthetic construct
  REGION 1..33: note = ATaRI peptide
VSDAIYDSSEYFTSNRGHTKNRLPALPCHLLAS

SEQ ID NO: 5767 - protein, 13 aa, synthetic construct
  REGION 1..13: note = ATaRI peptide
LLCDKVQKGKYIL

SEQ ID NO: 5768 - protein, 27 aa, synthetic construct
  REGION 1..27: note = ATaRI peptide
SPTDVHRQVSDLLLLLILIIFRDGISL

SEQ ID NO: 5769 - protein, 10 aa, synthetic construct
  REGION 1..10: note = ATaRI peptide
KEESAGVQGK

SEQ ID NO: 5770 - protein, 9 aa, synthetic construct
  REGION 1..9: note = ATaRI peptide
AVQDENGDR

SEQ ID NO: 5771 - protein, 23 aa, synthetic construct
  REGION 1..23: note = ATaRI peptide
LLDHPNGDGKRQSHIIGVTFSTF

SEQ ID NO: 5772 - protein, 37 aa, synthetic construct
  REGION 1..37: note = ATaRI peptide
LAALLKAAGKMVIWRSLMKNVTRNANPTSIEQSCCLL

SEQ ID NO: 5773 - protein, 61 aa, synthetic construct
  REGION 1..61: note = ATaRI peptide
PASTRQQIGKKKDKRQWRYFPAPPGWCLQLFLDMVWQFSFSFSGYTSLCVSLPPGLTLCLS

SEQ ID NO: 5774 - protein, 12 aa, synthetic construct
  REGION 1..12: note = ATaRI peptide
QGCPIAKWVSVT

SEQ ID NO: 5775 - protein, 15 aa, synthetic construct
  REGION 1..15: note = ATaRI peptide
LLGDDPKEVCLLPDV

SEQ ID NO: 5776 - protein, 36 aa, synthetic construct
  REGION 1..36: note = ATaRI peptide
NMQNGSTLVSWAEDSLAAVESVLTLLIKTYARLGNL

SEQ ID NO: 5777 - protein, 16 aa, synthetic construct
  REGION 1..16: note = ATaRI peptide
ASQAKQLAGKFNVKHL

SEQ ID NO: 5778 - protein, 14 aa, synthetic construct
  REGION 1..14: note = ATaRI peptide
QKPRGDVFSKSNKC

SEQ ID NO: 5779 - protein, 26 aa, synthetic construct
  REGION 1..26: note = ATaRI peptide
WEPIRDPAGKTISFNFFWYTFQCDTI

SEQ ID NO: 5780 - protein, 48 aa, synthetic construct
  REGION 1..48: note = ATaRI peptide
KKFAENLKVISYYRCLQDKSSDCFTFAGQWGISGFLSFFFFFFFSLLV

SEQ ID NO: 5781 - protein, 9 aa, synthetic construct
  REGION 1..9: note = ATaRI peptide
RVFMRMKLP

SEQ ID NO: 5782 - protein, 45 aa, synthetic construct
  REGION 1..45: note = ATaRI peptide
AHYKLCLPGTYHSPASASLVAGTTGAHHHAQLIFCIFSRDGVSPC

SEQ ID NO: 5783 - protein, 16 aa, synthetic construct
  REGION 1..16: note = ATaRI peptide
ALLYTSSKGNVNRNEI

SEQ ID NO: 5784 - protein, 31 aa, synthetic construct
  REGION 1..31: note = ATaRI peptide
RIDRLTDEVCILVHLKCLNLNIFECLVLQLR

SEQ ID NO: 5785 - protein, 9 aa, synthetic construct
  REGION 1..9: note = ATaRI peptide
LSPILHIVK

SEQ ID NO: 5786 - protein, 25 aa, synthetic construct
  REGION 1..25: note = ATaRI peptide
KTAAIFTAGIYVYNFTTLSQGFCLS

SEQ ID NO: 5787 - protein, 15 aa, synthetic construct
  REGION 1..15: note = ATaRI peptide
KLKEDLAKVYYKYIL

SEQ ID NO: 5788 - protein, 43 aa, synthetic construct
  REGION 1..43: note = ATaRI peptide
QGPPERVVCMQSSVFSLFEGVGVGWGFVLLGSKFGIHKPVWRM

SEQ ID NO: 5789 - protein, 12 aa, synthetic construct
  REGION 1..12: note = ATaRI peptide
ALSNMPVAVSIF

SEQ ID NO: 5790 - protein, 21 aa, synthetic construct
  REGION 1..21: note = ATaRI peptide
KELYPMIEVTLMLWYLMKVNV

SEQ ID NO: 5791 - protein, 9 aa, synthetic construct
  REGION 1..9: note = ATaRI peptide
NTELQLWQV

SEQ ID NO: 5792 - protein, 28 aa, synthetic construct
  REGION 1..28: note = ATaRI peptide
LDKKIQKEVNCLLYCLSTCYHKERIVIK

SEQ ID NO: 5793 - protein, 17 aa, synthetic construct
  REGION 1..17: note = ATaRI peptide
AKQRKLLEVRGKDPSIY

SEQ ID NO: 5794 - protein, 72 aa, synthetic construct
  REGION 1..72: note = ATaRI peptide
PSPNLRELRYAPSCWPPPRPQCLLVPFPPELLDLCGTPGAPGPCVPSFRARGSPPPPLCPSTRLFASTKALA

SEQ ID NO: 5795 - protein, 29 aa, synthetic construct
  REGION 1..29: note = ATaRI peptide
ALPQPDKKVVCLVLLFLLSCICLWMIISS

SEQ ID NO: 5796 - protein, 85 aa, synthetic construct
  REGION 1..85: note = ATaRI peptide
PSQLHRAHSKYNLFNSSPLRKQLCWGTLKSLVCRSLKAHERYRTLVCFVSSQRNVYFRGLPHSVRWTLMVVKKLAQATLHAGGLL

SEQ ID NO: 5797 - protein, 14 aa, synthetic construct
  REGION 1..14: note = ATaRI peptide
LPGRKQVRVMILSP

SEQ ID NO: 5798 - protein, 12 aa, synthetic construct
  REGION 1..12: note = ATaRI peptide
CWKLEILSGKTS

SEQ ID NO: 5799 - protein, 43 aa, synthetic construct
  REGION 1..43: note = ATaRI peptide
IDINTCNQVRTWQLALCCATKEHSLHSQSPRLFLSLLKILKYQ

SEQ ID NO: 5800 - protein, 57 aa, synthetic construct
  REGION 1..57: note = ATaRI peptide
ASPDVTNIVSMAWVRITPGRKSERNRDCGCVYVCLRVCHRSKQPSFEKGPCNNTLLK

SEQ ID NO: 5801 - protein, 18 aa, synthetic construct
  REGION 1..18: note = ATaRI peptide
ASPHATAKVRTTEKDLQA

SEQ ID NO: 5802 - protein, 13 aa, synthetic construct
  REGION 1..13: note = ATaRI peptide
EEVTTTTTVSMSD

SEQ ID NO: 5803 - protein, 34 aa, synthetic construct
  REGION 1..34: note = ATaRI peptide
DGEALSDSGTLRGYFWSESFSLLLIFLNWIEQLV

SEQ ID NO: 5804 - protein, 9 aa, synthetic construct
  REGION 1..9: note = ATaRI peptide
PCLERDNSR

SEQ ID NO: 5805 - protein, 20 aa, synthetic construct
  REGION 1..20: note = ATaRI peptide
DHLGFSWTGKKNVTQVFNKT

SEQ ID NO: 5806 - protein, 9 aa, synthetic construct
  REGION 1..9: note = ATaRI peptide
SLEYQQEYL

SEQ ID NO: 5807 - protein, 57 aa, synthetic construct
  REGION 1..57: note = ATaRI peptide
KEDGSIIKRFGLAWGDALPTNTIKIFPILRKEGENPYIYPKEDRKLPTLLYYNTLVK

SEQ ID NO: 5808 - protein, 9 aa, synthetic construct
  REGION 1..9: note = ATaRI peptide
LVKVINNPR

SEQ ID NO: 5809 - protein, 19 aa, synthetic construct
  REGION 1..19: note = ATaRI peptide
PQNFIRDVGMSGLFGLRYC

SEQ ID NO: 5810 - protein, 18 aa, synthetic construct
  REGION 1..18: note = ATaRI peptide
EGLDLGRVVRWCFYKVDF

SEQ ID NO: 5811 - protein, 17 aa, synthetic construct
  REGION 1..17: note = ATaRI peptide
KAVFQRTKVLPLLICFF

SEQ ID NO: 5812 - protein, 28 aa, synthetic construct
  REGION 1..28: note = ATaRI peptide
ATHLYLPGVSYLFSFPSLLFSNSSKTSS

SEQ ID NO: 5813 - protein, 22 aa, synthetic construct
  REGION 1..22: note = ATaRI peptide
RKDLGRHRGKLRSCTIDFKRNF

SEQ ID NO: 5814 - protein, 9 aa, synthetic construct
  REGION 1..9: note = ATaRI peptide
QIKNHLIKR

SEQ ID NO: 5815 - protein, 17 aa, synthetic construct
  REGION 1..17: note = ATaRI peptide
VQGDEVTLVSSYVNQDP

SEQ ID NO: 5816 - protein, 40 aa, synthetic construct
  REGION 1..40: note = ATaRI peptide
GIMLLKDQVSALINVPLIIGCFSLDAFSCLLTKIQWGYFQ

SEQ ID NO: 5817 - protein, 9 aa, synthetic construct
  REGION 1..9: note = ATaRI peptide
ALENDQKVR

SEQ ID NO: 5818 - protein, 24 aa, synthetic construct
  REGION 1..24: note = ATaRI peptide
SNVVWLLVGKWNIFLLFYCVLSMD

SEQ ID NO: 5819 - protein, 9 aa, synthetic construct
  REGION 1..9: note = ATaRI peptide
YITEDMSIR

SEQ ID NO: 5820 - protein, 23 aa, synthetic construct
  REGION 1..23: note = ATaRI peptide
IYYYMDEPGIVVVVVAVFFKVTE

SEQ ID NO: 5821 - protein, 11 aa, synthetic construct
  REGION 1..11: note = ATaRI peptide
LLEAEMLAVSL

SEQ ID NO: 5822 - protein, 13 aa, synthetic construct
  REGION 1..13: note = ATaRI peptide
KVHGRLPVVSVYT

SEQ ID NO: 5823 - protein, 9 aa, synthetic construct
  REGION 1..9: note = ATaRI peptide
ETHDARTKR

SEQ ID NO: 5824 - protein, 17 aa, synthetic construct
  REGION 1..17: note = ATaRI peptide
KEIPKIIDGNKMFRHLC

SEQ ID NO: 5825 - protein, 13 aa, synthetic construct
  REGION 1..13: note = ATaRI peptide
TKRDDGQARSVFT

SEQ ID NO: 5826 - protein, 12 aa, synthetic construct
  REGION 1..12: note = ATaRI peptide
SKTTFSENVRTF

SEQ ID NO: 5827 - protein, 16 aa, synthetic construct
  REGION 1..16: note = ATaRI peptide
ERKGKRARRCLLHFCV

SEQ ID NO: 5828 - protein, 42 aa, synthetic construct
  REGION 1..42: note = ATaRI peptide
SSETFGPAGNRHFYVLKISIYNNNNTKEAEDCSSCFLNVVSG

SEQ ID NO: 5829 - protein, 23 aa, synthetic construct
  REGION 1..23: note = ATaRI peptide
FTLKEKMKGMNDFSNKVLCIHNN

SEQ ID NO: 5830 - protein, 9 aa, synthetic construct
  REGION 1..9: note = ATaRI peptide
LEGITPNIQ

SEQ ID NO: 5831 - protein, 12 aa, synthetic construct
  REGION 1..12: note = ATaRI peptide
NYLRCVAEVSLL

SEQ ID NO: 5832 - protein, 25 aa, synthetic construct
  REGION 1..25: note = ATaRI peptide
AQPVAFDRGKIKSITTILWDLGMLC

SEQ ID NO: 5833 - protein, 12 aa, synthetic construct
  REGION 1..12: note = ATaRI peptide
QAKVIDDLKYVQ

SEQ ID NO: 5834 - protein, 9 aa, synthetic construct
  REGION 1..9: note = ATaRI peptide
PLKRMERAR

SEQ ID NO: 5835 - protein, 9 aa, synthetic construct
  REGION 1..9: note = ATaRI peptide
RFYIYRKPS

SEQ ID NO: 5836 - protein, 9 aa, synthetic construct
  REGION 1..9: note = ATaRI peptide
EHDDISLRR

SEQ ID NO: 5837 - protein, 31 aa, synthetic construct
  REGION 1..31: note = ATaRI peptide
TPVERNYTGKHPSYIPPHNIYFGILLYRRFS

SEQ ID NO: 5838 - protein, 59 aa, synthetic construct
  REGION 1..59: note = ATaRI peptide
LTPGSGGLGILCMFMSFSDLQHLFKLSSFIFINHKDIAKIRCFLYFSSLIIPISYLRNK

SEQ ID NO: 5839 - protein, 13 aa, synthetic construct
  REGION 1..13: note = ATaRI peptide
GDQTINLPSKLVM

SEQ ID NO: 5840 - protein, 9 aa, synthetic construct
  REGION 1..9: note = ATaRI peptide
YVTATRNEG

SEQ ID NO: 5841 - protein, 30 aa, synthetic construct
  REGION 1..30: note = ATaRI peptide
QIFAEATLRYSLFLNVLELIIKAVLVKVRY

SEQ ID NO: 5842 - protein, 22 aa, synthetic construct
  REGION 1..22: note = ATaRI peptide
TLMDGIGSVSIALVLILCRVNS

SEQ ID NO: 5843 - protein, 15 aa, synthetic construct
  REGION 1..15: note = ATaRI peptide
LKVLCNEAGECGLLW

SEQ ID NO: 5844 - protein, 14 aa, synthetic construct
  REGION 1..14: note = ATaRI peptide
LTAMDADEVAQACL

SEQ ID NO: 5845 - protein, 13 aa, synthetic construct
  REGION 1..13: note = ATaRI peptide
FNVTDADDGMYFI

SEQ ID NO: 5846 - protein, 19 aa, synthetic construct
  REGION 1..19: note = ATaRI peptide
LMITATDSGKSITPLFICR

SEQ ID NO: 5847 - protein, 20 aa, synthetic construct
  REGION 1..20: note = ATaRI peptide
CVCKTGYTGMTTFVLFSLRL

SEQ ID NO: 5848 - protein, 10 aa, synthetic construct
  REGION 1..10: note = ATaRI peptide
SYYCHCPFGE

SEQ ID NO: 5849 - protein, 34 aa, synthetic construct
  REGION 1..34: note = ATaRI peptide
VIARRAGMVRYFILLLLYIQLDLQIKYELGCKSC

SEQ ID NO: 5850 - protein, 10 aa, synthetic construct
  REGION 1..10: note = ATaRI peptide
SSNYTTVKVR

SEQ ID NO: 5851 - protein, 9 aa, synthetic construct
  REGION 1..9: note = ATaRI peptide
YSSASSDYE

SEQ ID NO: 5852 - protein, 58 aa, synthetic construct
  REGION 1..58: note = ATaRI peptide
TYITFYGKVIWHLNLTVLNGPKYNTLTILKQGQCPMVFKCLIYYSMESFKIWQKDVEE

SEQ ID NO: 5853 - protein, 23 aa, synthetic construct
  REGION 1..23: note = ATaRI peptide
PNGSAGVKVSFIFPGLQTYLQIK

SEQ ID NO: 5854 - protein, 25 aa, synthetic construct
  REGION 1..25: note = ATaRI peptide
PVADCVISVSFTSVMNTLELYFTVY

SEQ ID NO: 5855 - protein, 9 aa, synthetic construct
  REGION 1..9: note = ATaRI peptide
KTSFEDGSG

SEQ ID NO: 5856 - protein, 20 aa, synthetic construct
  REGION 1..20: note = ATaRI peptide
VDKLQELKVHFFKVHVSINQ

SEQ ID NO: 5857 - protein, 12 aa, synthetic construct
  REGION 1..12: note = ATaRI peptide
VIEAYRNKVLNS

SEQ ID NO: 5858 - protein, 17 aa, synthetic construct
  REGION 1..17: note = ATaRI peptide
TGISMGGHVSLFISAYI

SEQ ID NO: 5859 - protein, 30 aa, synthetic construct
  REGION 1..30: note = ATaRI peptide
TNLNLILEVIAHLMNNLYFLLKFPLYLKLL

SEQ ID NO: 5860 - protein, 17 aa, synthetic construct
  REGION 1..17: note = ATaRI peptide
QPAPVKLRVSCYRLSEV

SEQ ID NO: 5861 - protein, 41 aa, synthetic construct
  REGION 1..41: note = ATaRI peptide
WEDAKENYRSDIFFYTSREFYYFLLLFFFTQVDPIEGVFRK

SEQ ID NO: 5862 - protein, 31 aa, synthetic construct
  REGION 1..31: note = ATaRI peptide
RLEDFRVDVSFKSFPLFFLLSIYFSLLSVTF

SEQ ID NO: 5863 - protein, 9 aa, synthetic construct
  REGION 1..9: note = ATaRI peptide
GTIPQPVAR

SEQ ID NO: 5864 - protein, 34 aa, synthetic construct
  REGION 1..34: note = ATaRI peptide
SCALWIPEVRVVLFLLFLLFFKTEFNSVAQAGVQ

SEQ ID NO: 5865 - protein, 18 aa, synthetic construct
  REGION 1..18: note = ATaRI peptide
MKELKKICKYVLGFSNSN

SEQ ID NO: 5866 - protein, 47 aa, synthetic construct
  REGION 1..47: note = ATaRI peptide
SQAEREMQGKCPGRREGPTPLRVARGPAVHPPGPRAPAARNPGFETG

SEQ ID NO: 5867 - protein, 30 aa, synthetic construct
  REGION 1..30: note = ATaRI peptide
CERQDRLKVRPWPEGGGGCGLDQVGQPEGC

SEQ ID NO: 5868 - protein, 24 aa, synthetic construct
  REGION 1..24: note = ATaRI peptide
RNDLKSHVCILFEIYLRFEWGVLS

SEQ ID NO: 5869 - protein, 12 aa, synthetic construct
  REGION 1..12: note = ATaRI peptide
GLEKALKPGSIV

SEQ ID NO: 5870 - protein, 29 aa, synthetic construct
  REGION 1..29: note = ATaRI peptide
KKCHEIERVSTFYIKVFLFYSVDGFGQIS

SEQ ID NO: 5871 - protein, 25 aa, synthetic construct
  REGION 1..25: note = ATaRI peptide
AFEIYFRKGRQLGYSGPDKTDHCIS

SEQ ID NO: 5872 - protein, 18 aa, synthetic construct
  REGION 1..18: note = ATaRI peptide
DSLPHRLSGNHFILSLAF

SEQ ID NO: 5873 - protein, 30 aa, synthetic construct
  REGION 1..30: note = ATaRI peptide
QHEELLMKVNFCFLYVELLNARKINQASAK

SEQ ID NO: 5874 - protein, 22 aa, synthetic construct
  REGION 1..22: note = ATaRI peptide
YSTGLAMVVSFLLSLRLVRFQG

SEQ ID NO: 5875 - protein, 15 aa, synthetic construct
  REGION 1..15: note = ATaRI peptide
NNSLSSNGVSFPTVA

SEQ ID NO: 5876 - protein, 79 aa, synthetic construct
  REGION 1..79: note = ATaRI peptide
VFASISSTGKGHYLSEYLIKNQYMSLLHTHIHTMFSSCPKNILKREQILIPHPKFIHIHYLIQDVTSYFKNRQRSHFKG

SEQ ID NO: 5877 - protein, 16 aa, synthetic construct
  REGION 1..16: note = ATaRI peptide
VTLLKIELVSGSMEIY

SEQ ID NO: 5878 - protein, 40 aa, synthetic construct
  REGION 1..40: note = ATaRI peptide
CGFNPTEEGKFKILLFNLNSSFLLHFQKCHTILCYFSYTI

SEQ ID NO: 5879 - protein, 25 aa, synthetic construct
  REGION 1..25: note = ATaRI peptide
GDFATRRKGMYFSTACCMGHWEFIL

SEQ ID NO: 5880 - protein, 9 aa, synthetic construct
  REGION 1..9: note = ATaRI peptide
KQNLLSVGE

SEQ ID NO: 5881 - protein, 11 aa, synthetic construct
  REGION 1..11: note = ATaRI peptide
LIGDKEQRVSF

SEQ ID NO: 5882 - protein, 10 aa, synthetic construct
  REGION 1..10: note = ATaRI peptide
RIKNEKSKVI

SEQ ID NO: 5883 - protein, 39 aa, synthetic construct
  REGION 1..39: note = ATaRI peptide
PDVFNSADVSISWCFLVNNNILLNAIYFCNKSGLPFSMA

SEQ ID NO: 5884 - protein, 13 aa, synthetic construct
  REGION 1..13: note = ATaRI peptide
KLVERLHMVSILE

SEQ ID NO: 5885 - protein, 32 aa, synthetic construct
  REGION 1..32: note = ATaRI peptide
GLSKMQREWYVFSDVLDSTIDSSLNFMCILFS

SEQ ID NO: 5886 - protein, 25 aa, synthetic construct
  REGION 1..25: note = ATaRI peptide
LLPKLKEQGIGYPYQIIKTVLKCSC

SEQ ID NO: 5887 - protein, 9 aa, synthetic construct
  REGION 1..9: note = ATaRI peptide
EKEKLLTQV

SEQ ID NO: 5888 - protein, 20 aa, synthetic construct
  REGION 1..20: note = ATaRI peptide
KKRGPKPSVSIHEYVNMWIM

SEQ ID NO: 5889 - protein, 19 aa, synthetic construct
  REGION 1..19: note = ATaRI peptide
IGCGICIKVSNILFTGSNV

SEQ ID NO: 5890 - protein, 12 aa, synthetic construct
  REGION 1..12: note = ATaRI peptide
NATSKFMEVLNV

SEQ ID NO: 5891 - protein, 14 aa, synthetic construct
  REGION 1..14: note = ATaRI peptide
ALSEHLKQVNPITS

SEQ ID NO: 5892 - protein, 10 aa, synthetic construct
  REGION 1..10: note = ATaRI peptide
KKFKNCFQVR

SEQ ID NO: 5893 - protein, 9 aa, synthetic construct
  REGION 1..9: note = ATaRI peptide
CCPPWAMGE

SEQ ID NO: 5894 - protein, 53 aa, synthetic construct
  REGION 1..53: note = ATaRI peptide
EAVATGLQVSSAISEFNRTLLFVKHFYISPLNLTTHRVWGYYPHFTGEKTGEP

SEQ ID NO: 5895 - protein, 11 aa, synthetic construct
  REGION 1..11: note = ATaRI peptide
EHRSGGKLVSI

SEQ ID NO: 5896 - protein, 34 aa, synthetic construct
  REGION 1..34: note = ATaRI peptide
KLLDSMHDVSRAPPWFLSEGSATTYTLLTKGNRD

SEQ ID NO: 5897 - protein, 69 aa, synthetic construct
  REGION 1..69: note = ATaRI peptide
DDFVLDHSGKAILQLIHFSIFVTPEMKAWDLATQLVHVKKSDMLRKDSIGSTIFEPMKIKNNMKAFAYL

SEQ ID NO: 5898 - protein, 9 aa, synthetic construct
  REGION 1..9: note = ATaRI peptide
AVVKECIDR

SEQ ID NO: 5899 - protein, 54 aa, synthetic construct
  REGION 1..54: note = ATaRI peptide
ILSHPWVSVSTHIPREWASLCSVANSTVPHCDVCTCKSYASKLHGRCLSVPLSK

SEQ ID NO: 5900 - protein, 42 aa, synthetic construct
  REGION 1..42: note = ATaRI peptide
TTGVSVIMVSGRRQVWPDCGAGLEVFELGSRELPSHGSWCLP

SEQ ID NO: 5901 - protein, 62 aa, synthetic construct
  REGION 1..62: note = ATaRI peptide
VENTYFCPVSLFPWHVFHSLPFFSSVASDEYFLTPFFSPSKLYLALPMEGCLEEIFGGSRRI

SEQ ID NO: 5902 - protein, 31 aa, synthetic construct
  REGION 1..31: note = ATaRI peptide
SRINTPFRVRRAPEEGNLQLRTDFRRVFFWE

SEQ ID NO: 5903 - protein, 9 aa, synthetic construct
  REGION 1..9: note = ATaRI peptide
DVMLQLVLR

SEQ ID NO: 5904 - protein, 34 aa, synthetic construct
  REGION 1..34: note = ATaRI peptide
SKCMHDTSGRNSLVMIFKQKDASSISPWDMCPFG

SEQ ID NO: 5905 - protein, 43 aa, synthetic construct
  REGION 1..43: note = ATaRI peptide
RTQSTPFTGDHLKLLCGFCFRKYLYILEQERKVGKGKGYYRFV

SEQ ID NO: 5906 - protein, 59 aa, synthetic construct
  REGION 1..59: note = ATaRI peptide
MTPAALTKGKPGFSTAPLLKFLLHVPGLLASVHRCCTGFWILEAFRDIFIFMQQGGTTS

SEQ ID NO: 5907 - protein, 32 aa, synthetic construct
  REGION 1..32: note = ATaRI peptide
VIEAGAFQGKSPYICKDGWDRGWEKFTKCYLY

SEQ ID NO: 5908 - protein, 26 aa, synthetic construct
  REGION 1..26: note = ATaRI peptide
GSDLIVPAGIHCTDWIKHLLLLLKLH

SEQ ID NO: 5909 - protein, 22 aa, synthetic construct
  REGION 1..22: note = ATaRI peptide
SYGVLSYHVSNFFLLSQLWLVT

SEQ ID NO: 5910 - protein, 36 aa, synthetic construct
  REGION 1..36: note = ATaRI peptide
ATDESETSGKVECLKILLYFHQSASSFYSIYEQIVS

SEQ ID NO: 5911 - protein, 12 aa, synthetic construct
  REGION 1..12: note = ATaRI peptide
KIASFTCKGTDF

SEQ ID NO: 5912 - protein, 20 aa, synthetic construct
  REGION 1..20: note = ATaRI peptide
YFMGKSKAGKYFALRLSVDL

SEQ ID NO: 5913 - protein, 47 aa, synthetic construct
  REGION 1..47: note = ATaRI peptide
KYKNGDVCKYVSTVFFFVRWWGDTVTVVPPYLRGHILRPPSHPTVDA

SEQ ID NO: 5914 - protein, 50 aa, synthetic construct
  REGION 1..50: note = ATaRI peptide
ATALRSRMVRTVCLFISLSVTPQCLGFQSTRLCPPLATISKPKLRRCQKN

SEQ ID NO: 5915 - protein, 22 aa, synthetic construct
  REGION 1..22: note = ATaRI peptide
LTEACPYLVGCYPKTEKRMPTN

SEQ ID NO: 5916 - protein, 9 aa, synthetic construct
  REGION 1..9: note = ATaRI peptide
KVTSLILIR

SEQ ID NO: 5917 - protein, 10 aa, synthetic construct
  REGION 1..10: note = ATaRI peptide
LPAAQREAGM

SEQ ID NO: 5918 - protein, 23 aa, synthetic construct
  REGION 1..23: note = ATaRI peptide
IAEQAVAAGNRIVYVIRKYAIYL

SEQ ID NO: 5919 - protein, 9 aa, synthetic construct
  REGION 1..9: note = ATaRI peptide
EILMLMCFM

SEQ ID NO: 5920 - protein, 38 aa, synthetic construct
  REGION 1..38: note = ATaRI peptide
LGIYLCCNVRVYIFSVSFLLSYIWTYFFAIGHTALYFL

SEQ ID NO: 5921 - protein, 9 aa, synthetic construct
  REGION 1..9: note = ATaRI peptide
EDEKKKTDT

SEQ ID NO: 5922 - protein, 14 aa, synthetic construct
  REGION 1..14: note = ATaRI peptide
RKNPFVYKASVLYR

SEQ ID NO: 5923 - protein, 9 aa, synthetic construct
  REGION 1..9: note = ATaRI peptide
SRKNTGTEV

SEQ ID NO: 5924 - protein, 12 aa, synthetic construct
  REGION 1..12: note = ATaRI peptide
FWKRASIQVMLG

SEQ ID NO: 5925 - protein, 23 aa, synthetic construct
  REGION 1..23: note = ATaRI peptide
TYGIGLKEVSWFVSVILILKDGI

SEQ ID NO: 5926 - protein, 18 aa, synthetic construct
  REGION 1..18: note = ATaRI peptide
GAIDSCLEVSLFDFELFE

SEQ ID NO: 5927 - protein, 9 aa, synthetic construct
  REGION 1..9: note = ATaRI peptide
LEVELPLPR

SEQ ID NO: 5928 - protein, 41 aa, synthetic construct
  REGION 1..41: note = ATaRI peptide
ADRIQLSGRYILSTLLDFFVPSSNPHQSLRDEQFSKCFLNE

SEQ ID NO: 5929 - protein, 20 aa, synthetic construct
  REGION 1..20: note = ATaRI peptide
QCEPATNTCEFFLKVAADFG

SEQ ID NO: 5930 - protein, 10 aa, synthetic construct
  REGION 1..10: note = ATaRI peptide
PVKDLPPFGK

SEQ ID NO: 5931 - protein, 19 aa, synthetic construct
  REGION 1..19: note = ATaRI peptide
SPQSSPRKGRIKLLFVFLY

SEQ ID NO: 5932 - protein, 21 aa, synthetic construct
  REGION 1..21: note = ATaRI peptide
KALRLNLVGKWVYLFETLARV

SEQ ID NO: 5933 - protein, 9 aa, synthetic construct
  REGION 1..9: note = ATaRI peptide
VCHSCSLKR

SEQ ID NO: 5934 - protein, 25 aa, synthetic construct
  REGION 1..25: note = ATaRI peptide
LPREYLVQVNAYAKHMNPHSTVSLA

SEQ ID NO: 5935 - protein, 34 aa, synthetic construct
  REGION 1..34: note = ATaRI peptide
LPSRRCRAGKHDASWSILYSWVIGSFFFRSYFIN

SEQ ID NO: 5936 - protein, 11 aa, synthetic construct
  REGION 1..11: note = ATaRI peptide
SVGVGVVGGRC

SEQ ID NO: 5937 - protein, 48 aa, synthetic construct
  REGION 1..48: note = ATaRI peptide
MNMCRRNAGICQFKVIKLMLNFILSFTGITLSMNINGISIVLLLIWVP

SEQ ID NO: 5938 - protein, 20 aa, synthetic construct
  REGION 1..20: note = ATaRI peptide
YEKIQNSKGEYKGLEIEYYH

SEQ ID NO: 5939 - protein, 14 aa, synthetic construct
  REGION 1..14: note = ATaRI peptide
HKVHHEFQVCESYI

SEQ ID NO: 5940 - protein, 29 aa, synthetic construct
  REGION 1..29: note = ATaRI peptide
ELIIGQAEVSLALSQDELIIDIAKCFQFI

SEQ ID NO: 5941 - protein, 29 aa, synthetic construct
  REGION 1..29: note = ATaRI peptide
RRDLTIAIGTLSKIYICIYEMDFWKKGKQ

SEQ ID NO: 5942 - protein, 17 aa, synthetic construct
  REGION 1..17: note = ATaRI peptide
LKQHVEPLVIRYIRSPH

SEQ ID NO: 5943 - protein, 63 aa, synthetic construct
  REGION 1..63: note = ATaRI peptide
ESFRDPAEGTLPGTDVTHSLPGGDPVSTWAARDTCIIGRWSFRRQLGPLTLNDSCTNLWFVKT

SEQ ID NO: 5944 - protein, 9 aa, synthetic construct
  REGION 1..9: note = ATaRI peptide
LVAPISKDR

SEQ ID NO: 5945 - protein, 22 aa, synthetic construct
  REGION 1..22: note = ATaRI peptide
ENFEISYKVTFYFNRWNSPSRY

SEQ ID NO: 5946 - protein, 10 aa, synthetic construct
  REGION 1..10: note = ATaRI peptide
RFIDAVYKVF

SEQ ID NO: 5947 - protein, 68 aa, synthetic construct
  REGION 1..68: note = ATaRI peptide
GRFMTSGKVCNHKENIILFKSYLINPIYSFHFSDWHLMNILVRYWSSLIFNSACHIFLGSMPEVITIG

SEQ ID NO: 5948 - protein, 49 aa, synthetic construct
  REGION 1..49: note = ATaRI peptide
SDMDLLNPRKFVNTMRIGMMSFQKNDCYSNFNILKLYCLEIAKLLEQRT

SEQ ID NO: 5949 - protein, 9 aa, synthetic construct
  REGION 1..9: note = ATaRI peptide
KPEQVIKEV

SEQ ID NO: 5950 - protein, 15 aa, synthetic construct
  REGION 1..15: note = ATaRI peptide
KEKQDLMQVHYKTFC

SEQ ID NO: 5951 - protein, 13 aa, synthetic construct
  REGION 1..13: note = ATaRI peptide
SQTSISGDVSYLC

SEQ ID NO: 5952 - protein, 45 aa, synthetic construct
  REGION 1..45: note = ATaRI peptide
TPSRALAERFVFLLEIGQLNSCGGVLTGYYFPWVWKSQLHLFLVD

SEQ ID NO: 5953 - protein, 9 aa, synthetic construct
  REGION 1..9: note = ATaRI peptide
GVYEAFVKQ

SEQ ID NO: 5954 - protein, 15 aa, synthetic construct
  REGION 1..15: note = ATaRI peptide
ERNQYICRVRWQCSW

SEQ ID NO: 5955 - protein, 9 aa, synthetic construct
  REGION 1..9: note = ATaRI peptide
DHLVGYIIR

SEQ ID NO: 5956 - protein, 27 aa, synthetic construct
  REGION 1..27: note = ATaRI peptide
MAGFINYKVIILLPNTGNLCFNIKLSF

SEQ ID NO: 5957 - protein, 19 aa, synthetic construct
  REGION 1..19: note = ATaRI peptide
EHDAWMSKQYVLHCPFRIF

SEQ ID NO: 5958 - protein, 16 aa, synthetic construct
  REGION 1..16: note = ATaRI peptide
AKTLCNHEVSYSLRII

SEQ ID NO: 5959 - protein, 10 aa, synthetic construct
  REGION 1..10: note = ATaRI peptide
GVQDFVPFGR

SEQ ID NO: 5960 - protein, 30 aa, synthetic construct
  REGION 1..30: note = ATaRI peptide
EDVGKKIEVSYEICFKIFLIIKVCLYQYFK

SEQ ID NO: 5961 - protein, 34 aa, synthetic construct
  REGION 1..34: note = ATaRI peptide
EIVCKCHKVFFYSYFIKHHMWSIPILCYFSLPIK

SEQ ID NO: 5962 - protein, 35 aa, synthetic construct
  REGION 1..35: note = ATaRI peptide
FMFSGLKQVQVISCDAYVDTKVCQETESCTFSFYE

SEQ ID NO: 5963 - protein, 14 aa, synthetic construct
  REGION 1..14: note = ATaRI peptide
EHLTTCFPGNEAGT

SEQ ID NO: 5964 - protein, 9 aa, synthetic construct
  REGION 1..9: note = ATaRI peptide
EFWFYYKSR

SEQ ID NO: 5965 - protein, 49 aa, synthetic construct
  REGION 1..49: note = ATaRI peptide
KMVALLIEVNGQLKFFLFLSISSLAYSFSEFSLHNSRFCISSFSCYSSF

SEQ ID NO: 5966 - protein, 14 aa, synthetic construct
  REGION 1..14: note = ATaRI peptide
AFKDNIHVGKYTAF

SEQ ID NO: 5967 - protein, 24 aa, synthetic construct
  REGION 1..24: note = ATaRI peptide
LSSLVSNVRYVVAASNHFVFMNIY

SEQ ID NO: 5968 - protein, 18 aa, synthetic construct
  REGION 1..18: note = ATaRI peptide
YFNSIGTSGKFFDVCFSF

SEQ ID NO: 5969 - protein, 44 aa, synthetic construct
  REGION 1..44: note = ATaRI peptide
MMQSGRKGGKLVLYSSKLVWFCPRRTFYRAPFSLPYWKLIFKII

SEQ ID NO: 5970 - protein, 13 aa, synthetic construct
  REGION 1..13: note = ATaRI peptide
EHLKNANKVVYVG

SEQ ID NO: 5971 - protein, 19 aa, synthetic construct
  REGION 1..19: note = ATaRI peptide
KASITSGEVVLTAFPLNLF

SEQ ID NO: 5972 - protein, 32 aa, synthetic construct
  REGION 1..32: note = ATaRI peptide
DLQVILEKVSIHLTQIETKGKEARNEGSQTGW

SEQ ID NO: 5973 - protein, 41 aa, synthetic construct
  REGION 1..41: note = ATaRI peptide
GQLQAYRKVKPVHLFLEKTIMTIIHFVFNYIFPLNGRYFVI

SEQ ID NO: 5974 - protein, 27 aa, synthetic construct
  REGION 1..27: note = ATaRI peptide
DKYVSQFNRKYICFSLWTNSGYFLYKI

SEQ ID NO: 5975 - protein, 9 aa, synthetic construct
  REGION 1..9: note = ATaRI peptide
LPSNGEKKP

SEQ ID NO: 5976 - protein, 13 aa, synthetic construct
  REGION 1..13: note = ATaRI peptide
DAAKLKYKVKNLF

SEQ ID NO: 5977 - protein, 18 aa, synthetic construct
  REGION 1..18: note = ATaRI peptide
SVYSWRDDVCLRIFWIIL

SEQ ID NO: 5978 - protein, 54 aa, synthetic construct
  REGION 1..54: note = ATaRI peptide
WTRRSLHLRWDLGGGSSLGWVFQAPTPDLPRYIQYIWCESACPVRIWMQSAVLH

SEQ ID NO: 5979 - protein, 24 aa, synthetic construct
  REGION 1..24: note = ATaRI peptide
CGHSSNIREYVQISDSQKVLLAVF

SEQ ID NO: 5980 - protein, 9 aa, synthetic construct
  REGION 1..9: note = ATaRI peptide
YFAFDRKEE

SEQ ID NO: 5981 - protein, 50 aa, synthetic construct
  REGION 1..50: note = ATaRI peptide
PAYFADRTQYVSESVVVTQPLPCAANTGALKTAGDMRSRRSHLIPCFRCA

SEQ ID NO: 5982 - protein, 9 aa, synthetic construct
  REGION 1..9: note = ATaRI peptide
DEVLRGTKL

SEQ ID NO: 5983 - protein, 44 aa, synthetic construct
  REGION 1..44: note = ATaRI peptide
VPGCRLVSVRQISFYFSGPFRFCIGKQTKTTLALPSEISNMRSE

SEQ ID NO: 5984 - protein, 24 aa, synthetic construct
  REGION 1..24: note = ATaRI peptide
LYNAENVEVGTCEYDQYCTVYLTV

SEQ ID NO: 5985 - protein, 9 aa, synthetic construct
  REGION 1..9: note = ATaRI peptide
SEYVRAVYR

SEQ ID NO: 5986 - protein, 11 aa, synthetic construct
  REGION 1..11: note = ATaRI peptide
ILHTFTNSVSP

SEQ ID NO: 5987 - protein, 17 aa, synthetic construct
  REGION 1..17: note = ATaRI peptide
EETQLDIVGESVFSALF

SEQ ID NO: 5988 - protein, 21 aa, synthetic construct
  REGION 1..21: note = ATaRI peptide
QWEPVFQNVSAVIVYKNFLSV

SEQ ID NO: 5989 - protein, 9 aa, synthetic construct
  REGION 1..9: note = ATaRI peptide
FLHETLLDR

SEQ ID NO: 5990 - protein, 15 aa, synthetic construct
  REGION 1..15: note = ATaRI peptide
RSQVLQIKRYLGDVV

SEQ ID NO: 5991 - protein, 36 aa, synthetic construct
  REGION 1..36: note = ATaRI peptide
LHSYTKLKGIVFFGLFFQLSLLHLIFLISRLLSYSF

SEQ ID NO: 5992 - protein, 21 aa, synthetic construct
  REGION 1..21: note = ATaRI peptide
CLPLSSPEVIIFISFIIFFYF

SEQ ID NO: 5993 - protein, 14 aa, synthetic construct
  REGION 1..14: note = ATaRI peptide
GIGRVFKNGTEIFR

SEQ ID NO: 5994 - protein, 25 aa, synthetic construct
  REGION 1..25: note = ATaRI peptide
VAKRDIRKVCVVIPSPAFEKLRFTG

SEQ ID NO: 5995 - protein, 35 aa, synthetic construct
  REGION 1..35: note = ATaRI peptide
LGLGKRPFGGCAASRWLAAVSVWQAPDGGCCRSSC

SEQ ID NO: 5996 - protein, 35 aa, synthetic construct
  REGION 1..35: note = ATaRI peptide
RDEGATGLRYQRAPSSAAAMLGCGARAWEYFSANL

SEQ ID NO: 5997 - protein, 17 aa, synthetic construct
  REGION 1..17: note = ATaRI peptide
YFVKDPKRVRISQTYYM

SEQ ID NO: 5998 - protein, 34 aa, synthetic construct
  REGION 1..34: note = ATaRI peptide
LDYIIRNTGIEVLSFVHVNLVHFQTIFLLSKSKR

SEQ ID NO: 5999 - protein, 39 aa, synthetic construct
  REGION 1..39: note = ATaRI peptide
CEKEIDHKVRKFTILYIYIYIYIYIHTHTHTHIHTHTCI

SEQ ID NO: 6000 - protein, 34 aa, synthetic construct
  REGION 1..34: note = ATaRI peptide
NHHFFDGKVRAVTIISLFSYCGITDFRVPPLFFF

SEQ ID NO: 6001 - protein, 25 aa, synthetic construct
  REGION 1..25: note = ATaRI peptide
LCNSCTSKVWCSYRMYFYLDIFILF

SEQ ID NO: 6002 - protein, 11 aa, synthetic construct
  REGION 1..11: note = ATaRI peptide
LCKKCVKPCKY

SEQ ID NO: 6003 - protein, 10 aa, synthetic construct
  REGION 1..10: note = ATaRI peptide
CFGQHSWRGE

SEQ ID NO: 6004 - protein, 9 aa, synthetic construct
  REGION 1..9: note = ATaRI peptide
IIKLLGDVR

SEQ ID NO: 6005 - protein, 11 aa, synthetic construct
  REGION 1..11: note = ATaRI peptide
THISALLQVFI

SEQ ID NO: 6006 - protein, 13 aa, synthetic construct
  REGION 1..13: note = ATaRI peptide
AFFRWLYVGKLIE

SEQ ID NO: 6007 - protein, 22 aa, synthetic construct
  REGION 1..22: note = ATaRI peptide
VLPELNKVVCTSAFSQCSHCPA

SEQ ID NO: 6008 - protein, 15 aa, synthetic construct
  REGION 1..15: note = ATaRI peptide
FNVERVGQVWALNSF

SEQ ID NO: 6009 - protein, 57 aa, synthetic construct
  REGION 1..57: note = ATaRI peptide
EGVKELVDRYILPFPVVAPCKPLPSLLHLEPLLSGWAFLTVLSWVCLAFGACQDCSR

SEQ ID NO: 6010 - protein, 13 aa, synthetic construct
  REGION 1..13: note = ATaRI peptide
QQLNLEGKVNQDC

SEQ ID NO: 6011 - protein, 9 aa, synthetic construct
  REGION 1..9: note = ATaRI peptide
DIKTFRTDW

SEQ ID NO: 6012 - protein, 11 aa, synthetic construct
  REGION 1..11: note = ATaRI peptide
QERIIQFQVCF

SEQ ID NO: 6013 - protein, 9 aa, synthetic construct
  REGION 1..9: note = ATaRI peptide
TDSGSAPTL

SEQ ID NO: 6014 - protein, 9 aa, synthetic construct
  REGION 1..9: note = ATaRI peptide
DDSTQVPPG

SEQ ID NO: 6015 - protein, 21 aa, synthetic construct
  REGION 1..21: note = ATaRI peptide
EHVRIGQKGKLLIINVIISEK

SEQ ID NO: 6016 - protein, 11 aa, synthetic construct
  REGION 1..11: note = ATaRI peptide
HSISSHPSVSS

SEQ ID NO: 6017 - protein, 19 aa, synthetic construct
  REGION 1..19: note = ATaRI peptide
TFLPDTISGKEFVKTFLKF

SEQ ID NO: 6018 - protein, 11 aa, synthetic construct
  REGION 1..11: note = ATaRI peptide
SSKRPPSVGKA

SEQ ID NO: 6019 - protein, 9 aa, synthetic construct
  REGION 1..9: note = ATaRI peptide
ISAPPSVCR

SEQ ID NO: 6020 - protein, 54 aa, synthetic construct
  REGION 1..54: note = ATaRI peptide
RARHKQRKASDSSQHLEAPGLRAFEGAVPRQSLGRAEPQEVGALTCVHLPTTLF

SEQ ID NO: 6021 - protein, 21 aa, synthetic construct
  REGION 1..21: note = ATaRI peptide
SPEPGRLEGRWGGWARGALGV

SEQ ID NO: 6022 - protein, 9 aa, synthetic construct
  REGION 1..9: note = ATaRI peptide
EKPQLPHLQ

SEQ ID NO: 6023 - protein, 15 aa, synthetic construct
  REGION 1..15: note = ATaRI peptide
PSAEQLVQVGAQGLL

SEQ ID NO: 6024 - protein, 25 aa, synthetic construct
  REGION 1..25: note = ATaRI peptide
HFSVSTITRYADPVASSHCRENALS

SEQ ID NO: 6025 - protein, 50 aa, synthetic construct
  REGION 1..50: note = ATaRI peptide
IWSLGWHCGYVFSSVYINSCLQQYDINIVIRMPFFFLFKSFINLAFWKNI

SEQ ID NO: 6026 - protein, 50 aa, synthetic construct
  REGION 1..50: note = ATaRI peptide
ILAGNLLAGTGTELKQGLQDLDFDFLRGNGGGEHMRGKYYKVIASDGLSL

SEQ ID NO: 6027 - protein, 25 aa, synthetic construct
  REGION 1..25: note = ATaRI peptide
KKGSEASAGRKQRGEGRDMSAASVM

SEQ ID NO: 6028 - protein, 27 aa, synthetic construct
  REGION 1..27: note = ATaRI peptide
KATHANYKVWASASFKNIYAHILTSNG

SEQ ID NO: 6029 - protein, 10 aa, synthetic construct
  REGION 1..10: note = ATaRI peptide
RPSKKCVASE

SEQ ID NO: 6030 - protein, 81 aa, synthetic construct
  REGION 1..81: note = ATaRI peptide
YCLLDSDQVCHFYLSSIIPVPNLVQITLKDTEIYFKEMWSACFPHQLLLLIFFMHLAGAEGLGHSQPQQVSILAPAPWTQG

SEQ ID NO: 6031 - protein, 21 aa, synthetic construct
  REGION 1..21: note = ATaRI peptide
SGRKAVTHGNGTHLSLSSSVS

SEQ ID NO: 6032 - protein, 9 aa, synthetic construct
  REGION 1..9: note = ATaRI peptide
QPSESGPFR

SEQ ID NO: 6033 - protein, 14 aa, synthetic construct
  REGION 1..14: note = ATaRI peptide
LILFCDYVVSLKCL

SEQ ID NO: 6034 - protein, 9 aa, synthetic construct
  REGION 1..9: note = ATaRI peptide
LQSSGLAQR

SEQ ID NO: 6035 - protein, 21 aa, synthetic construct
  REGION 1..21: note = ATaRI peptide
LETVSPDKVSVQRVCMGGTGR

SEQ ID NO: 6036 - protein, 71 aa, synthetic construct
  REGION 1..71: note = ATaRI peptide
EEVDPNTQSKSQDPFFSYMLFLQDLKIIHRDVHRGECGLLEAHRSSAVSCCSSLAVREAVVHCFASSFVSE

SEQ ID NO: 6037 - protein, 68 aa, synthetic construct
  REGION 1..68: note = ATaRI peptide
FIYRINTLGTLGASPSGHHCRTSTGRKSRAPSTGIFSFDSRKDLSMIIIQTYVNTFCSVGKTPFILRK

SEQ ID NO: 6038 - protein, 10 aa, synthetic construct
  REGION 1..10: note = ATaRI peptide
PSLSPATTGT

SEQ ID NO: 6039 - protein, 9 aa, synthetic construct
  REGION 1..9: note = ATaRI peptide
LSNLKGIAQ

SEQ ID NO: 6040 - protein, 9 aa, synthetic construct
  REGION 1..9: note = ATaRI peptide
ERVSVLFDR

SEQ ID NO: 6041 - protein, 104 aa, synthetic construct
  REGION 1..104: note = ATaRI peptide
SSAGSLDLVSHCLPSSHRPQGCPHQLTDDTSLPWKPVFTKLSVHFVKLGDKARVPAQAQWQSAGWPSAPSGPGLMVPQPRAPERARKTISYTREGTQSIFGFIS

SEQ ID NO: 6042 - protein, 16 aa, synthetic construct
  REGION 1..16: note = ATaRI peptide
PSSGGSSRRYLNIFTK

SEQ ID NO: 6043 - protein, 15 aa, synthetic construct
  REGION 1..15: note = ATaRI peptide
DITPTPFVVSSHFLS

SEQ ID NO: 6044 - protein, 10 aa, synthetic construct
  REGION 1..10: note = ATaRI peptide
PEEGKGVLVT

SEQ ID NO: 6045 - protein, 9 aa, synthetic construct
  REGION 1..9: note = ATaRI peptide
LAVAEKQDR

SEQ ID NO: 6046 - protein, 41 aa, synthetic construct
  REGION 1..41: note = ATaRI peptide
ELCAPPGNRYDVDGSWCDFYSPDFLTGSIQMPSEMFHLSNR

SEQ ID NO: 6047 - protein, 27 aa, synthetic construct
  REGION 1..27: note = ATaRI peptide
KEISFCSQVNGDGFFYSIAMEFLNEFL

SEQ ID NO: 6048 - protein, 9 aa, synthetic construct
  REGION 1..9: note = ATaRI peptide
TSDFMNTKR

SEQ ID NO: 6049 - protein, 9 aa, synthetic construct
  REGION 1..9: note = ATaRI peptide
RPDMIILQV

SEQ ID NO: 6050 - protein, 17 aa, synthetic construct
  REGION 1..17: note = ATaRI peptide
LDLLEQLQVEHIYKAAS

SEQ ID NO: 6051 - protein, 39 aa, synthetic construct
  REGION 1..39: note = ATaRI peptide
KAHRRTHTGNRNTRPTSSFFLRSIRMECKGCYDQSFQAS

SEQ ID NO: 6052 - protein, 32 aa, synthetic construct
  REGION 1..32: note = ATaRI peptide
ITNVVQNTVSRWLLPLFPLYFPGPSFDISIYQ

SEQ ID NO: 6053 - protein, 12 aa, synthetic construct
  REGION 1..12: note = ATaRI peptide
ATPDKLNKVSTV

SEQ ID NO: 6054 - protein, 9 aa, synthetic construct
  REGION 1..9: note = ATaRI peptide
QDQAKVLIK

SEQ ID NO: 6055 - protein, 21 aa, synthetic construct
  REGION 1..21: note = ATaRI peptide
MISSVLLEVSGLWRESASESK

SEQ ID NO: 6056 - protein, 9 aa, synthetic construct
  REGION 1..9: note = ATaRI peptide
KRSEINLPG

SEQ ID NO: 6057 - protein, 9 aa, synthetic construct
  REGION 1..9: note = ATaRI peptide
TSQLDNGMR

SEQ ID NO: 6058 - protein, 11 aa, synthetic construct
  REGION 1..11: note = ATaRI peptide
QEGDTIRQVIQ

SEQ ID NO: 6059 - protein, 41 aa, synthetic construct
  REGION 1..41: note = ATaRI peptide
KGITGDNKVTLDKDKICLIMSGFVFSFIFKNHGLICIVFNI

SEQ ID NO: 6060 - protein, 12 aa, synthetic construct
  REGION 1..12: note = ATaRI peptide
QPTRRHLKVHVS

SEQ ID NO: 6061 - protein, 30 aa, synthetic construct
  REGION 1..30: note = ATaRI peptide
MLSECDFKGEKKFSLNPVHLIRRLCVLCHD

SEQ ID NO: 6062 - protein, 9 aa, synthetic construct
  REGION 1..9: note = ATaRI peptide
KFKPKELAR

SEQ ID NO: 6063 - protein, 9 aa, synthetic construct
  REGION 1..9: note = ATaRI peptide
ALQEKHNLV

SEQ ID NO: 6064 - protein, 9 aa, synthetic construct
  REGION 1..9: note = ATaRI peptide
KYLISHSFR

SEQ ID NO: 6065 - protein, 26 aa, synthetic construct
  REGION 1..26: note = ATaRI peptide
RLKVSEKARCVMFPPQFPPGSHGISF

SEQ ID NO: 6066 - protein, 38 aa, synthetic construct
  REGION 1..38: note = ATaRI peptide
IFNRQNDCRYFLPYVCKDICMGVTAAFVEFAEAHYTSP

SEQ ID NO: 6067 - protein, 13 aa, synthetic construct
  REGION 1..13: note = ATaRI peptide
QDVLKTFKVGQVP

SEQ ID NO: 6068 - protein, 24 aa, synthetic construct
  REGION 1..24: note = ATaRI peptide
GNIELASSGLFHKRLVLRQIMVTV

SEQ ID NO: 6069 - protein, 17 aa, synthetic construct
  REGION 1..17: note = ATaRI peptide
VELVLSQKVKCRVEESG

SEQ ID NO: 6070 - protein, 54 aa, synthetic construct
  REGION 1..54: note = ATaRI peptide
HLPNLNSQGKEDMFYFRSACSGPICSKLLLNLKEDYVLYVAIPLARVFARVCDS

SEQ ID NO: 6071 - protein, 17 aa, synthetic construct
  REGION 1..17: note = ATaRI peptide
MTEGSGTMVRPQIKSNL

SEQ ID NO: 6072 - protein, 20 aa, synthetic construct
  REGION 1..20: note = ATaRI peptide
SATAYSNPGRVWPLLSDFIF

SEQ ID NO: 6073 - protein, 17 aa, synthetic construct
  REGION 1..17: note = ATaRI peptide
QPIESLLWVILFFSPQF

SEQ ID NO: 6074 - protein, 18 aa, synthetic construct
  REGION 1..18: note = ATaRI peptide
QDFDQMLQVSLFVVFLHN

SEQ ID NO: 6075 - protein, 10 aa, synthetic construct
  REGION 1..10: note = ATaRI peptide
ELHKRSHTGN

SEQ ID NO: 6076 - protein, 114 aa, synthetic construct
  REGION 1..114: note = ATaRI peptide
YICEICGKRSVLGVFFRVEGSMSSLSVFGSQCLLKWWLTDEPQVGSPCHCRTQVNSNLLALHVTHERIIKRKVNSKKEKLGQESQKGNGVLNATKLFYTNIFIHSKNVSENIID

SEQ ID NO: 6077 - protein, 9 aa, synthetic construct
  REGION 1..9: note = ATaRI peptide
GSTAPQNSR

SEQ ID NO: 6078 - protein, 9 aa, synthetic construct
  REGION 1..9: note = ATaRI peptide
NLITKVYSR

SEQ ID NO: 6079 - protein, 29 aa, synthetic construct
  REGION 1..29: note = ATaRI peptide
FILNTQSKVRILRLNLFFCIFKGIGTFEI

SEQ ID NO: 6080 - protein, 58 aa, synthetic construct
  REGION 1..58: note = ATaRI peptide
LYFFYKNVVCNPREFVPFPFVPSKTVASGMKTKCPMLSSLSLLMYWEQPGLVLLSFQN

SEQ ID NO: 6081 - protein, 14 aa, synthetic construct
  REGION 1..14: note = ATaRI peptide
ILARMQEESKYSNC

SEQ ID NO: 6082 - protein, 11 aa, synthetic construct
  REGION 1..11: note = ATaRI peptide
FFVSDYTEVSF

SEQ ID NO: 6083 - protein, 26 aa, synthetic construct
  REGION 1..26: note = ATaRI peptide
IHTSLQSKVRLAVAHCLLMWFHVDVP

SEQ ID NO: 6084 - protein, 9 aa, synthetic construct
  REGION 1..9: note = ATaRI peptide
QQHRRLLFW

SEQ ID NO: 6085 - protein, 9 aa, synthetic construct
  REGION 1..9: note = ATaRI peptide
ESRSEREKG

SEQ ID NO: 6086 - protein, 50 aa, synthetic construct
  REGION 1..50: note = ATaRI peptide
PVFHQFLEVPNCCFMKCMFACLELPNNFIHPLYVIFCLLYFSAYVGITVT

SEQ ID NO: 6087 - protein, 16 aa, synthetic construct
  REGION 1..16: note = ATaRI peptide
DSKVPSLQVGMLKDNP

SEQ ID NO: 6088 - protein, 45 aa, synthetic construct
  REGION 1..45: note = ATaRI peptide
DNILLDEHGKPATNPLQGLSVESLRHWEIVRGWGLGLAELDISIG

SEQ ID NO: 6089 - protein, 14 aa, synthetic construct
  REGION 1..14: note = ATaRI peptide
LMPGFVPNVSGSPT

SEQ ID NO: 6090 - protein, 9 aa, synthetic construct
  REGION 1..9: note = ATaRI peptide
EFIIFNREK

SEQ ID NO: 6091 - protein, 12 aa, synthetic construct
  REGION 1..12: note = ATaRI peptide
NVSSQLLEGKVK

SEQ ID NO: 6092 - protein, 26 aa, synthetic construct
  REGION 1..26: note = ATaRI peptide
CMNVALRPGMFIRNDKNVTKNVRLSL

SEQ ID NO: 6093 - protein, 46 aa, synthetic construct
  REGION 1..46: note = ATaRI peptide
LHAVVQTPGKSIPSRDKLYTFNLLTILTPLTKIGLWIGFSCLDFSV

SEQ ID NO: 6094 - protein, 12 aa, synthetic construct
  REGION 1..12: note = ATaRI peptide
DLLQVADNRCIK

SEQ ID NO: 6095 - protein, 10 aa, synthetic construct
  REGION 1..10: note = ATaRI peptide
ETMAKLQLVS

SEQ ID NO: 6096 - protein, 16 aa, synthetic construct
  REGION 1..16: note = ATaRI peptide
KVESFAVTGKMSNFDS

SEQ ID NO: 6097 - protein, 56 aa, synthetic construct
  REGION 1..56: note = ATaRI peptide
SIFRTPEKVMSLYKSRPESIFMNKFFWFIIILNVTLFVLALKNPDFDSCFLLWPAL

SEQ ID NO: 6098 - protein, 15 aa, synthetic construct
  REGION 1..15: note = ATaRI peptide
EALREKLEVRRLTCF

SEQ ID NO: 6099 - protein, 9 aa, synthetic construct
  REGION 1..9: note = ATaRI peptide
QKTEVNSLR

SEQ ID NO: 6100 - protein, 15 aa, synthetic construct
  REGION 1..15: note = ATaRI peptide
LLEKEIQEVIYLFVL

SEQ ID NO: 6101 - protein, 9 aa, synthetic construct
  REGION 1..9: note = ATaRI peptide
KLTLSESKL

SEQ ID NO: 6102 - protein, 56 aa, synthetic construct
  REGION 1..56: note = ATaRI peptide
LRIKAEYEGKPQVIWTFQVFLILLKVITHFRLIMLKKELCQFSKGKTHDILGFLFF

SEQ ID NO: 6103 - protein, 19 aa, synthetic construct
  REGION 1..19: note = ATaRI peptide
MAQLKISQGIMVFIMIKIF

SEQ ID NO: 6104 - protein, 27 aa, synthetic construct
  REGION 1..27: note = ATaRI peptide
LVDPEKAKAYPFDCYSLQLLSSTIDLF

SEQ ID NO: 6105 - protein, 9 aa, synthetic construct
  REGION 1..9: note = ATaRI peptide
PLLAFLFRG

SEQ ID NO: 6106 - protein, 13 aa, synthetic construct
  REGION 1..13: note = ATaRI peptide
QMDIIVSEVRIFS

SEQ ID NO: 6107 - protein, 24 aa, synthetic construct
  REGION 1..24: note = ATaRI peptide
SAVDRGFFRLVFCKFVKTQIQWKH

SEQ ID NO: 6108 - protein, 18 aa, synthetic construct
  REGION 1..18: note = ATaRI peptide
LIECLQGKVRDVLQKYRF

SEQ ID NO: 6109 - protein, 9 aa, synthetic construct
  REGION 1..9: note = ATaRI peptide
RQPMEGRSR

SEQ ID NO: 6110 - protein, 39 aa, synthetic construct
  REGION 1..39: note = ATaRI peptide
GRQRTRHQVGRPSRQRRGGERGARGFWVLRARSPGSATP

SEQ ID NO: 6111 - protein, 42 aa, synthetic construct
  REGION 1..42: note = ATaRI peptide
YPINQKFRVRVLSSIIESQLLPSCARDWEESGGINCVMFGPV

SEQ ID NO: 6112 - protein, 9 aa, synthetic construct
  REGION 1..9: note = ATaRI peptide
FPEVLACER

SEQ ID NO: 6113 - protein, 29 aa, synthetic construct
  REGION 1..29: note = ATaRI peptide
KILSKQEKVSLQPMFQGNLKIVYYNIYNL

SEQ ID NO: 6114 - protein, 9 aa, synthetic construct
  REGION 1..9: note = ATaRI peptide
EPGKSRRHR

SEQ ID NO: 6115 - protein, 74 aa, synthetic construct
  REGION 1..74: note = ATaRI peptide
PSHIPFSNRYVPFRSAFGISDSRVCPAPAAVLQFCFCLLVLRQELLLCCPGRSAVAQSWLTATSASWVQAILLP

SEQ ID NO: 6116 - protein, 32 aa, synthetic construct
  REGION 1..32: note = ATaRI peptide
LKDLQSKQGEVKSTVRTHARITSLRNLDWGKS

SEQ ID NO: 6117 - protein, 25 aa, synthetic construct
  REGION 1..25: note = ATaRI peptide
PPAKDQVEMYVRLYSVIKCAFVKIR

SEQ ID NO: 6118 - protein, 22 aa, synthetic construct
  REGION 1..22: note = ATaRI peptide
LFPASECEGKETFVSSFIHCNL

SEQ ID NO: 6119 - protein, 37 aa, synthetic construct
  REGION 1..37: note = ATaRI peptide
ERLLDFNRVSGLSSSSSLTYKQPPPPVVTVVKNLGVM

SEQ ID NO: 6120 - protein, 16 aa, synthetic construct
  REGION 1..16: note = ATaRI peptide
WIPQNDLLGKTLVNKY

SEQ ID NO: 6121 - protein, 9 aa, synthetic construct
  REGION 1..9: note = ATaRI peptide
EILPNWETM

SEQ ID NO: 6122 - protein, 45 aa, synthetic construct
  REGION 1..45: note = ATaRI peptide
PNLCIFQQVSGGDLLLSSMFCLKFIDAELCIFVVKFERYLGFWGC

SEQ ID NO: 6123 - protein, 158 aa, synthetic construct
  REGION 1..158: note = ATaRI peptide
QQLWSWCLVREPSEHPTGLQQAVDLAGSLFPGTLLLPQGRFQLLCPFAPVRLHRPQCTPCFAAPASLSWSCSCFLALGGERLSSPSPKGPSPPSTHGSRAPSPGSQRDPGEAAFWKGVLPLISNKFGLLSQIAFPLALGKSIFLSLSLFICNRVIILA

SEQ ID NO: 6124 - protein, 26 aa, synthetic construct
  REGION 1..26: note = ATaRI peptide
LINKKELLRYEHLLELSSFLGMFYIV

SEQ ID NO: 6125 - protein, 38 aa, synthetic construct
  REGION 1..38: note = ATaRI peptide
GNSSKGTEGYVQRKLDFFSPDVAFFFLWWYLKFTTILF

SEQ ID NO: 6126 - protein, 95 aa, synthetic construct
  REGION 1..95: note = ATaRI peptide
YILESNRKVNLTGFIKYSLRAYQLVSGKGESLKDYFKQLACIKHTFYLDSMHNCVMKVVGGLCAFFYKMLRGFTATYICLETSRNSLIQFLVFMY

SEQ ID NO: 6127 - protein, 38 aa, synthetic construct
  REGION 1..38: note = ATaRI peptide
QEDGSLTKVTVMRNGQAFHRDVYSSPQSLPRSNRDFPA

SEQ ID NO: 6128 - protein, 9 aa, synthetic construct
  REGION 1..9: note = ATaRI peptide
LTEVPVPTR

SEQ ID NO: 6129 - protein, 9 aa, synthetic construct
  REGION 1..9: note = ATaRI peptide
CEELQRTGR

SEQ ID NO: 6130 - protein, 10 aa, synthetic construct
  REGION 1..10: note = ATaRI peptide
LSDSKPSDSE

SEQ ID NO: 6131 - protein, 27 aa, synthetic construct
  REGION 1..27: note = ATaRI peptide
PSVTRYAKVKESPVFYVFLWDNCPTEM

SEQ ID NO: 6132 - protein, 9 aa, synthetic construct
  REGION 1..9: note = ATaRI peptide
QSHPLQYIG

SEQ ID NO: 6133 - protein, 10 aa, synthetic construct
  REGION 1..10: note = ATaRI peptide
ILVQLPLPGT

SEQ ID NO: 6134 - protein, 23 aa, synthetic construct
  REGION 1..23: note = ATaRI peptide
INKWSLCRGKKGVCYLCYILFFF

SEQ ID NO: 6135 - protein, 9 aa, synthetic construct
  REGION 1..9: note = ATaRI peptide
VNAPSNPPR

SEQ ID NO: 6136 - protein, 50 aa, synthetic construct
  REGION 1..50: note = ATaRI peptide
QCTNILSQVKFCIREKVLYILMSVIQDLRMSLEDADEKGQRRLILFISSS

SEQ ID NO: 6137 - protein, 21 aa, synthetic construct
  REGION 1..21: note = ATaRI peptide
YKNMIREQVSTNELYIPSDYQ

SEQ ID NO: 6138 - protein, 10 aa, synthetic construct
  REGION 1..10: note = ATaRI peptide
KDSMIENMVK

SEQ ID NO: 6139 - protein, 26 aa, synthetic construct
  REGION 1..26: note = ATaRI peptide
EQVAELKQVIFHFDPILLCHVLIIIE

SEQ ID NO: 6140 - protein, 9 aa, synthetic construct
  REGION 1..9: note = ATaRI peptide
EVLNMLHLW

SEQ ID NO: 6141 - protein, 24 aa, synthetic construct
  REGION 1..24: note = ATaRI peptide
QYPWGVVQGMCTAWEMESSYLAPM

SEQ ID NO: 6142 - protein, 47 aa, synthetic construct
  REGION 1..47: note = ATaRI peptide
DRFLALMKVFHHFYKYVFLFLCPVPSTQGSRNIYRMGIITSTVHKNL

SEQ ID NO: 6143 - protein, 16 aa, synthetic construct
  REGION 1..16: note = ATaRI peptide
GGTSLIQKVQCCFHVH

SEQ ID NO: 6144 - protein, 28 aa, synthetic construct
  REGION 1..28: note = ATaRI peptide
FLQTKIATVSYNENYQIILFFCCSSILQ

SEQ ID NO: 6145 - protein, 24 aa, synthetic construct
  REGION 1..24: note = ATaRI peptide
CRHRPLNLGKWFAEGRLPYDPVKL

SEQ ID NO: 6146 - protein, 18 aa, synthetic construct
  REGION 1..18: note = ATaRI peptide
PIIHRDLKVRTLEFLWIK

SEQ ID NO: 6147 - protein, 9 aa, synthetic construct
  REGION 1..9: note = ATaRI peptide
NVVEEEIKK

SEQ ID NO: 6148 - protein, 44 aa, synthetic construct
  REGION 1..44: note = ATaRI peptide
KFSTYHALGKEVTLPELVMGTPVGRCWLHTVHLDYKLVLCLFIY

SEQ ID NO: 6149 - protein, 38 aa, synthetic construct
  REGION 1..38: note = ATaRI peptide
VMPGNPLMGKCFHGPLFFGEMCVLGSSTNILEVALHPP

SEQ ID NO: 6150 - protein, 14 aa, synthetic construct
  REGION 1..14: note = ATaRI peptide
DVSLLRKQVGTFLS

SEQ ID NO: 6151 - protein, 15 aa, synthetic construct
  REGION 1..15: note = ATaRI peptide
FTAGRMKAEYVLESA

SEQ ID NO: 6152 - protein, 48 aa, synthetic construct
  REGION 1..48: note = ATaRI peptide
STEGDILEVGYLVYFVVLTLSKHKIMNLNGKLIGTNRMLFFFWLFKIR

SEQ ID NO: 6153 - protein, 10 aa, synthetic construct
  REGION 1..10: note = ATaRI peptide
LFLTDVTRGE

SEQ ID NO: 6154 - protein, 10 aa, synthetic construct
  REGION 1..10: note = ATaRI peptide
ALKAFVEASK

SEQ ID NO: 6155 - protein, 11 aa, synthetic construct
  REGION 1..11: note = ATaRI peptide
LLEIPAAKVSS

SEQ ID NO: 6156 - protein, 17 aa, synthetic construct
  REGION 1..17: note = ATaRI peptide
IDGIVHFESKRFCVFLS

SEQ ID NO: 6157 - protein, 9 aa, synthetic construct
  REGION 1..9: note = ATaRI peptide
QLSHSKEEW

SEQ ID NO: 6158 - protein, 15 aa, synthetic construct
  REGION 1..15: note = ATaRI peptide
EKYKEMVKVILVENI

SEQ ID NO: 6159 - protein, 11 aa, synthetic construct
  REGION 1..11: note = ATaRI peptide
VAIAAYLLVRV

SEQ ID NO: 6160 - protein, 9 aa, synthetic construct
  REGION 1..9: note = ATaRI peptide
PWIPVIAAR

SEQ ID NO: 6161 - protein, 16 aa, synthetic construct
  REGION 1..16: note = ATaRI peptide
LRIPSTKRVCLILMLF

SEQ ID NO: 6162 - protein, 14 aa, synthetic construct
  REGION 1..14: note = ATaRI peptide
SQGQSQRPRYVMKK

SEQ ID NO: 6163 - protein, 19 aa, synthetic construct
  REGION 1..19: note = ATaRI peptide
LFALATLKGTKTFYIQSTV

SEQ ID NO: 6164 - protein, 15 aa, synthetic construct
  REGION 1..15: note = ATaRI peptide
ETELEFLKVSIQDYK

SEQ ID NO: 6165 - protein, 30 aa, synthetic construct
  REGION 1..30: note = ATaRI peptide
ETKKISFSVCPFNLFSLYFQMILPTSNVTY

SEQ ID NO: 6166 - protein, 46 aa, synthetic construct
  REGION 1..46: note = ATaRI peptide
DPGQAYVLGQQKQAYLLCPIPHAQREVNKIILIIKLFWVPCPNCQN

SEQ ID NO: 6167 - protein, 46 aa, synthetic construct
  REGION 1..46: note = ATaRI peptide
QPKEKISKGNVNVSYLCILFHFSVSFLFSDIRTKMDSLCTKLMQLK

SEQ ID NO: 6168 - protein, 25 aa, synthetic construct
  REGION 1..25: note = ATaRI peptide
ESDGRIHKGIVFILCGNYMYEYYNK

SEQ ID NO: 6169 - protein, 23 aa, synthetic construct
  REGION 1..23: note = ATaRI peptide
PEIDTALLVRLMKSNLQFYRIST

SEQ ID NO: 6170 - protein, 24 aa, synthetic construct
  REGION 1..24: note = ATaRI peptide
APKSTKGNGKDIFILLYSPTVMGM

SEQ ID NO: 6171 - protein, 14 aa, synthetic construct
  REGION 1..14: note = ATaRI peptide
GIPSKELEVSGFCQ

SEQ ID NO: 6172 - protein, 19 aa, synthetic construct
  REGION 1..19: note = ATaRI peptide
NRYKNILPCKFQFGFRFNM

SEQ ID NO: 6173 - protein, 11 aa, synthetic construct
  REGION 1..11: note = ATaRI peptide
AMTLEDIQVSE

SEQ ID NO: 6174 - protein, 15 aa, synthetic construct
  REGION 1..15: note = ATaRI peptide
RHGMVQTEVSHGWAS

SEQ ID NO: 6175 - protein, 11 aa, synthetic construct
  REGION 1..11: note = ATaRI peptide
SKFPFPTKVIP

SEQ ID NO: 6176 - protein, 91 aa, synthetic construct
  REGION 1..91: note = ATaRI peptide
SRSSSEHKVSRGGGHSVRWDALLYLYVPKEDKLLVMALQNCPLLLMRQLFVFKMLLFGGRVKGINNTQRFRCRFILLTVISEVKNQNRFLC

SEQ ID NO: 6177 - protein, 9 aa, synthetic construct
  REGION 1..9: note = ATaRI peptide
GKPQVKFDK

SEQ ID NO: 6178 - protein, 9 aa, synthetic construct
  REGION 1..9: note = ATaRI peptide
YSETVDLIK

SEQ ID NO: 6179 - protein, 15 aa, synthetic construct
  REGION 1..15: note = ATaRI peptide
QEKIFAVLWCVFSFV

SEQ ID NO: 6180 - protein, 10 aa, synthetic construct
  REGION 1..10: note = ATaRI peptide
EALTRKNKGK

SEQ ID NO: 6181 - protein, 9 aa, synthetic construct
  REGION 1..9: note = ATaRI peptide
YEIENGRPR

SEQ ID NO: 6182 - protein, 39 aa, synthetic construct
  REGION 1..39: note = ATaRI peptide
LFSQDHLVVRNSVSGRDLVLWIDENDLKVDLEICMSFSK

SEQ ID NO: 6183 - protein, 9 aa, synthetic construct
  REGION 1..9: note = ATaRI peptide
DFSTFQECM

SEQ ID NO: 6184 - protein, 22 aa, synthetic construct
  REGION 1..22: note = ATaRI peptide
ELSDLIRKVGKTLILRILLFLT

SEQ ID NO: 6185 - protein, 21 aa, synthetic construct
  REGION 1..21: note = ATaRI peptide
YHSLALSKGKKHFLDLSVSRK

SEQ ID NO: 6186 - protein, 9 aa, synthetic construct
  REGION 1..9: note = ATaRI peptide
LTASFLKKR

SEQ ID NO: 6187 - protein, 41 aa, synthetic construct
  REGION 1..41: note = ATaRI peptide
KKEWISSMVIANTYFRYRTNTIAVYFCWKLGEMGTMIVIAR

SEQ ID NO: 6188 - protein, 20 aa, synthetic construct
  REGION 1..20: note = ATaRI peptide
SKQSLQVLSKFYVTLSVLSI

SEQ ID NO: 6189 - protein, 21 aa, synthetic construct
  REGION 1..21: note = ATaRI peptide
GMMKELHKVRVTLKECMYYFM

SEQ ID NO: 6190 - protein, 49 aa, synthetic construct
  REGION 1..49: note = ATaRI peptide
SCMWFPAKVSLFFFFFPPEQKRHPIYCNINTIDSGVKLGHIELCYSYFE

SEQ ID NO: 6191 - protein, 9 aa, synthetic construct
  REGION 1..9: note = ATaRI peptide
KELSPRLGK

SEQ ID NO: 6192 - protein, 18 aa, synthetic construct
  REGION 1..18: note = ATaRI peptide
YHSLALSKGNFSVILIVL

SEQ ID NO: 6193 - protein, 25 aa, synthetic construct
  REGION 1..25: note = ATaRI peptide
QLGLGHTESMEHILRFLLPTDILVR

SEQ ID NO: 6194 - protein, 9 aa, synthetic construct
  REGION 1..9: note = ATaRI peptide
RVTQIACGR

SEQ ID NO: 6195 - protein, 107 aa, synthetic construct
  REGION 1..107: note = ATaRI peptide
TKRWQSTKRYTPQSDSLLIYHSQVSFPKLVLHSNMRFCSQGFPEKQTHRICVYFCLYLYLYHVCLSIYVSMEGRERDYFKELAYEIVGAGKSKICRAGQQAGDLGRS

SEQ ID NO: 6196 - protein, 38 aa, synthetic construct
  REGION 1..38: note = ATaRI peptide
EMLKKLHRVRVPLETSVFLSSCKNSLPFSWLESLSRLV

SEQ ID NO: 6197 - protein, 16 aa, synthetic construct
  REGION 1..16: note = ATaRI peptide
TDTLLKIEVCMPICLH

SEQ ID NO: 6198 - protein, 33 aa, synthetic construct
  REGION 1..33: note = ATaRI peptide
EDLRKELWVRCNSHLMFLLLRKEKHKRMWQRVS

SEQ ID NO: 6199 - protein, 9 aa, synthetic construct
  REGION 1..9: note = ATaRI peptide
KELSPDLGK

SEQ ID NO: 6200 - protein, 33 aa, synthetic construct
  REGION 1..33: note = ATaRI peptide
RSDNDLLKVIFIGYCSCNDDKISPAFSAIVSSG

SEQ ID NO: 6201 - protein, 13 aa, synthetic construct
  REGION 1..13: note = ATaRI peptide
EFPNFDKQVSSRV

SEQ ID NO: 6202 - protein, 14 aa, synthetic construct
  REGION 1..14: note = ATaRI peptide
LKVFAEDQGNYSGS

SEQ ID NO: 6203 - protein, 14 aa, synthetic construct
  REGION 1..14: note = ATaRI peptide
NGILADEMVSVLYF

SEQ ID NO: 6204 - protein, 10 aa, synthetic construct
  REGION 1..10: note = ATaRI peptide
IVVPASTIGL

SEQ ID NO: 6205 - protein, 9 aa, synthetic construct
  REGION 1..9: note = ATaRI peptide
EDYNVIVTT

SEQ ID NO: 6206 - protein, 37 aa, synthetic construct
  REGION 1..37: note = ATaRI peptide
RRMFSSKTVSINAYFLPNMLFVFYLGHSSVRSLLLFS

SEQ ID NO: 6207 - protein, 11 aa, synthetic construct
  REGION 1..11: note = ATaRI peptide
DGKTQISERLV

SEQ ID NO: 6208 - protein, 10 aa, synthetic construct
  REGION 1..10: note = ATaRI peptide
AQITGTEHCK

SEQ ID NO: 6209 - protein, 9 aa, synthetic construct
  REGION 1..9: note = ATaRI peptide
EADNTKKAK

SEQ ID NO: 6210 - protein, 9 aa, synthetic construct
  REGION 1..9: note = ATaRI peptide
SKVATTYSR

SEQ ID NO: 6211 - protein, 9 aa, synthetic construct
  REGION 1..9: note = ATaRI peptide
SAVIATKTR

SEQ ID NO: 6212 - protein, 20 aa, synthetic construct
  REGION 1..20: note = ATaRI peptide
RCQRKILGVSIGNVFILNEF

SEQ ID NO: 6213 - protein, 100 aa, synthetic construct
  REGION 1..100: note = ATaRI peptide
FSLFFVPLVSAGTARGAQAGTGATIGAMSPLSNKHGGGGRAQTGRGSTQGLVCEAQGCSEWHQGGRPAPPEAPRPSLSRTETDAHRRKGQLSVLLREASR

SEQ ID NO: 6214 - protein, 32 aa, synthetic construct
  REGION 1..32: note = ATaRI peptide
LLQALAQNSKFHYVYSNSKEENQISSHSETGM

SEQ ID NO: 6215 - protein, 15 aa, synthetic construct
  REGION 1..15: note = ATaRI peptide
LICALMGSGKYSSII

SEQ ID NO: 6216 - protein, 20 aa, synthetic construct
  REGION 1..20: note = ATaRI peptide
HKLLHKKASKYNHKFLHHLS

SEQ ID NO: 6217 - protein, 25 aa, synthetic construct
  REGION 1..25: note = ATaRI peptide
CLACVPCIVSTQKLIIISGRLESEF

SEQ ID NO: 6218 - protein, 11 aa, synthetic construct
  REGION 1..11: note = ATaRI peptide
KLRPHYPLVSK

SEQ ID NO: 6219 - protein, 24 aa, synthetic construct
  REGION 1..24: note = ATaRI peptide
EGMRLVCRVRVIFSPWGRKCLSST

SEQ ID NO: 6220 - protein, 17 aa, synthetic construct
  REGION 1..17: note = ATaRI peptide
EIDHAVHLVRTSLFYFE

SEQ ID NO: 6221 - protein, 13 aa, synthetic construct
  REGION 1..13: note = ATaRI peptide
CLMQAIDAGQPQC

SEQ ID NO: 6222 - protein, 30 aa, synthetic construct
  REGION 1..30: note = ATaRI peptide
APNVPHYASKYYPEIWYKLTIYSTNTYSYI

SEQ ID NO: 6223 - protein, 25 aa, synthetic construct
  REGION 1..25: note = ATaRI peptide
TIEPMICEGEKKGCHDIFQLNLYVF

SEQ ID NO: 6224 - protein, 35 aa, synthetic construct
  REGION 1..35: note = ATaRI peptide
APPTRLPKGMSEPLGWSYVQLLNFCFQSTFHYSPF

SEQ ID NO: 6225 - protein, 10 aa, synthetic construct
  REGION 1..10: note = ATaRI peptide
TVIPAGEKGE

SEQ ID NO: 6226 - protein, 45 aa, synthetic construct
  REGION 1..45: note = ATaRI peptide
VTDVALHQVVFLLVIFKLEANRVMLLKSSGVVWVFCLFVFSSVTQ

SEQ ID NO: 6227 - protein, 9 aa, synthetic construct
  REGION 1..9: note = ATaRI peptide
KTMRRKMIL

SEQ ID NO: 6228 - protein, 12 aa, synthetic construct
  REGION 1..12: note = ATaRI peptide
GSQRLFRKVTPL

SEQ ID NO: 6229 - protein, 15 aa, synthetic construct
  REGION 1..15: note = ATaRI peptide
WKVCLAFKVRCYTGL

SEQ ID NO: 6230 - protein, 9 aa, synthetic construct
  REGION 1..9: note = ATaRI peptide
EQLKTVLEM

SEQ ID NO: 6231 - protein, 20 aa, synthetic construct
  REGION 1..20: note = ATaRI peptide
DGGMVKEMVRSIEFTYASFF

SEQ ID NO: 6232 - protein, 21 aa, synthetic construct
  REGION 1..21: note = ATaRI peptide
EQKQNPTVGMWCKGNCVPYPS

SEQ ID NO: 6233 - protein, 26 aa, synthetic construct
  REGION 1..26: note = ATaRI peptide
LTSSGCIDGMCTHAHTDSYLHPCTHP

SEQ ID NO: 6234 - protein, 12 aa, synthetic construct
  REGION 1..12: note = ATaRI peptide
SVEFLGSSGMFL

SEQ ID NO: 6235 - protein, 9 aa, synthetic construct
  REGION 1..9: note = ATaRI peptide
SIKFIHQEW

SEQ ID NO: 6236 - protein, 20 aa, synthetic construct
  REGION 1..20: note = ATaRI peptide
LRRFILSVVRRCFHCFFFLN

SEQ ID NO: 6237 - protein, 9 aa, synthetic construct
  REGION 1..9: note = ATaRI peptide
WTVTAGYLL

SEQ ID NO: 6238 - protein, 50 aa, synthetic construct
  REGION 1..50: note = ATaRI peptide
KVKEWSLMVCVCNTRLILYVRNSEYFSSHLKFFFLAHLFPYYIVSRELIF

SEQ ID NO: 6239 - protein, 9 aa, synthetic construct
  REGION 1..9: note = ATaRI peptide
MQEEMIKAL

SEQ ID NO: 6240 - protein, 30 aa, synthetic construct
  REGION 1..30: note = ATaRI peptide
HFIIQYVDVRFQFSSYVYFDVVHCGTIILK

SEQ ID NO: 6241 - protein, 28 aa, synthetic construct
  REGION 1..28: note = ATaRI peptide
GSHNSDVQVMYTFVNNHWPFFFFVLFKI

SEQ ID NO: 6242 - protein, 10 aa, synthetic construct
  REGION 1..10: note = ATaRI peptide
EFFWRQNWGM

SEQ ID NO: 6243 - protein, 21 aa, synthetic construct
  REGION 1..21: note = ATaRI peptide
IHPGNVQSRYENAYFIRQHLE

SEQ ID NO: 6244 - protein, 15 aa, synthetic construct
  REGION 1..15: note = ATaRI peptide
TISETAYEVCCSHRT

SEQ ID NO: 6245 - protein, 22 aa, synthetic construct
  REGION 1..22: note = ATaRI peptide
FLPDGNAKVSGTDEMTNGINTY

SEQ ID NO: 6246 - protein, 18 aa, synthetic construct
  REGION 1..18: note = ATaRI peptide
LGVSSLNSGMYCLHSFPL

SEQ ID NO: 6247 - protein, 9 aa, synthetic construct
  REGION 1..9: note = ATaRI peptide
AGFGIGLAR

SEQ ID NO: 6248 - protein, 14 aa, synthetic construct
  REGION 1..14: note = ATaRI peptide
GKSFHTYDVSDFFC

SEQ ID NO: 6249 - protein, 66 aa, synthetic construct
  REGION 1..66: note = ATaRI peptide
SAFARNKEVGIAKLLVCQSVFVCHDSGGNFNFVILYPAHSGTIQYSFFSNVYSVFWRKINFQKRLT

SEQ ID NO: 6250 - protein, 45 aa, synthetic construct
  REGION 1..45: note = ATaRI peptide
KFNKSLGHGRSSTRQNKLVTKETFQHSMKQLEEVSSMHFIFSWMN

SEQ ID NO: 6251 - protein, 38 aa, synthetic construct
  REGION 1..38: note = ATaRI peptide
KKDDITATVSELVYKSIFSLKLSYGNLVILKVSHHNID

SEQ ID NO: 6252 - protein, 17 aa, synthetic construct
  REGION 1..17: note = ATaRI peptide
LLNLDVIKVIINILYRP

SEQ ID NO: 6253 - protein, 16 aa, synthetic construct
  REGION 1..16: note = ATaRI peptide
EEGLVNNKCKLNYKIF

SEQ ID NO: 6254 - protein, 12 aa, synthetic construct
  REGION 1..12: note = ATaRI peptide
AYLALFLKVSLM

SEQ ID NO: 6255 - protein, 11 aa, synthetic construct
  REGION 1..11: note = ATaRI peptide
IDLLERLKGRF

SEQ ID NO: 6256 - protein, 28 aa, synthetic construct
  REGION 1..28: note = ATaRI peptide
HRHAMNELGKTKMFFNDIDNYWWIFKSW

SEQ ID NO: 6257 - protein, 9 aa, synthetic construct
  REGION 1..9: note = ATaRI peptide
VNDLKRANR

SEQ ID NO: 6258 - protein, 9 aa, synthetic construct
  REGION 1..9: note = ATaRI peptide
AEFTNAIRR

SEQ ID NO: 6259 - protein, 23 aa, synthetic construct
  REGION 1..23: note = ATaRI peptide
CWPCGGMRGALRINGVMGTLLPS

SEQ ID NO: 6260 - protein, 22 aa, synthetic construct
  REGION 1..22: note = ATaRI peptide
GNVFAVEAGMYFLGSFLIYPII

SEQ ID NO: 6261 - protein, 22 aa, synthetic construct
  REGION 1..22: note = ATaRI peptide
STVTHVIVVRILLNLSYVTQIA

SEQ ID NO: 6262 - protein, 48 aa, synthetic construct
  REGION 1..48: note = ATaRI peptide
FGSCPVIYSKLNCQISSIIFMKEHFWTLFILTETGECSEVEAIYYRST

SEQ ID NO: 6263 - protein, 47 aa, synthetic construct
  REGION 1..47: note = ATaRI peptide
KYKKEKQQGKFFNKRNIKEITIDNDFGVLHPYIVEVQGHLKVFFSCI

SEQ ID NO: 6264 - protein, 16 aa, synthetic construct
  REGION 1..16: note = ATaRI peptide
ELFDFYNKVCIFKIIF

SEQ ID NO: 6265 - protein, 24 aa, synthetic construct
  REGION 1..24: note = ATaRI peptide
EFFATAGKVNCENAIAKLCVYSLL

SEQ ID NO: 6266 - protein, 29 aa, synthetic construct
  REGION 1..29: note = ATaRI peptide
ERVQNALEVSVFVTLLTTSFKTFGTLPFW

SEQ ID NO: 6267 - protein, 25 aa, synthetic construct
  REGION 1..25: note = ATaRI peptide
GESRDRSQGKTKLRTDNIFTYFHRK

SEQ ID NO: 6268 - protein, 9 aa, synthetic construct
  REGION 1..9: note = ATaRI peptide
KAVIWGLYR

SEQ ID NO: 6269 - protein, 36 aa, synthetic construct
  REGION 1..36: note = ATaRI peptide
LLLQESQQVCNLLDSQKWYMSKTVFGVSFLVLNTKT

SEQ ID NO: 6270 - protein, 19 aa, synthetic construct
  REGION 1..19: note = ATaRI peptide
IWDYFIAKVIKMLSRSIFS

SEQ ID NO: 6271 - protein, 26 aa, synthetic construct
  REGION 1..26: note = ATaRI peptide
EHSNSNSYRYGIFYFKFLFKNNGVYK

SEQ ID NO: 6272 - protein, 11 aa, synthetic construct
  REGION 1..11: note = ATaRI peptide
PFAGHDLAGNK

SEQ ID NO: 6273 - protein, 9 aa, synthetic construct
  REGION 1..9: note = ATaRI peptide
LEPTNTPFK

SEQ ID NO: 6274 - protein, 22 aa, synthetic construct
  REGION 1..22: note = ATaRI peptide
DDIEVETKGYLHSLFLFSNVAI

SEQ ID NO: 6275 - protein, 9 aa, synthetic construct
  REGION 1..9: note = ATaRI peptide
TAGLSTDNR

SEQ ID NO: 6276 - protein, 40 aa, synthetic construct
  REGION 1..40: note = ATaRI peptide
GEAREMGQVRWLMPVIPALWEAEMGRSPEARSSRPAWPTW

SEQ ID NO: 6277 - protein, 34 aa, synthetic construct
  REGION 1..34: note = ATaRI peptide
SLPSSWDYRCASSRPANFWIFSRDGVSPCWPGWS

SEQ ID NO: 6278 - protein, 10 aa, synthetic construct
  REGION 1..10: note = ATaRI peptide
YCGRNTGLSK

SEQ ID NO: 6279 - protein, 53 aa, synthetic construct
  REGION 1..53: note = ATaRI peptide
ASKPQSIQGKESPRHLALVGESEAASIFFSYVVVFYVNCSVKTLESSIAYFLL

SEQ ID NO: 6280 - protein, 21 aa, synthetic construct
  REGION 1..21: note = ATaRI peptide
SGVVIIMDGNLFTILIIILLD

SEQ ID NO: 6281 - protein, 9 aa, synthetic construct
  REGION 1..9: note = ATaRI peptide
LSGSKSSRR

SEQ ID NO: 6282 - protein, 14 aa, synthetic construct
  REGION 1..14: note = ATaRI peptide
IFDRSREEVQENVF

SEQ ID NO: 6283 - protein, 153 aa, synthetic construct
  REGION 1..153: note = ATaRI peptide
SDLERGYTVGAGRGRTGPREPGLRLLRPGNTLGRRRLGAGGPLVFSPLPRPRGRAAPLARLSRKRAPLPGTAAAGAPSPSGSNPLLPDELQSSDAALAILPAARLREPRMGCVPFWHSCPLSPDSSSFAADSRWLPSSVQLVQLENLFFFFKS

SEQ ID NO: 6284 - protein, 9 aa, synthetic construct
  REGION 1..9: note = ATaRI peptide
SLPKAESCG

SEQ ID NO: 6285 - protein, 24 aa, synthetic construct
  REGION 1..24: note = ATaRI peptide
NEYVAIKLVSSCFLIFLNDFFVTF

SEQ ID NO: 6286 - protein, 43 aa, synthetic construct
  REGION 1..43: note = ATaRI peptide
VLMIAIQLVSKIRYLKLFEQLHGCWSQIHIKSLKFCDIVLQSV

SEQ ID NO: 6287 - protein, 11 aa, synthetic construct
  REGION 1..11: note = ATaRI peptide
EVLCENFPGNE

SEQ ID NO: 6288 - protein, 31 aa, synthetic construct
  REGION 1..31: note = ATaRI peptide
KMQQSKNQVCCPLDMKYLPFMIETYTFFFNR

SEQ ID NO: 6289 - protein, 16 aa, synthetic construct
  REGION 1..16: note = ATaRI peptide
FRKSMYEEVTIYNFAL

SEQ ID NO: 6290 - protein, 17 aa, synthetic construct
  REGION 1..17: note = ATaRI peptide
QLSNLQKEVNNHLSVRS

SEQ ID NO: 6291 - protein, 12 aa, synthetic construct
  REGION 1..12: note = ATaRI peptide
SFSAPSGTGNSF

SEQ ID NO: 6292 - protein, 12 aa, synthetic construct
  REGION 1..12: note = ATaRI peptide
GGIWGFIKVRRV

SEQ ID NO: 6293 - protein, 13 aa, synthetic construct
  REGION 1..13: note = ATaRI peptide
DPGMAPYISMYIS

SEQ ID NO: 6294 - protein, 28 aa, synthetic construct
  REGION 1..28: note = ATaRI peptide
FGWIKGVLVCIYRLNFIVTAYLLVIKSS

SEQ ID NO: 6295 - protein, 39 aa, synthetic construct
  REGION 1..39: note = ATaRI peptide
ETVVELLKVIHLPSSHSFTKSLLRDYMPITMLEVGKAVI

SEQ ID NO: 6296 - protein, 10 aa, synthetic construct
  REGION 1..10: note = ATaRI peptide
YVGIAVSVGK

SEQ ID NO: 6297 - protein, 25 aa, synthetic construct
  REGION 1..25: note = ATaRI peptide
MICGHVHMVSINFVFFFKFFFKVLF

SEQ ID NO: 6298 - protein, 24 aa, synthetic construct
  REGION 1..24: note = ATaRI peptide
VWWLFDDGGKVVNFFKMILNLLTL

SEQ ID NO: 6299 - protein, 23 aa, synthetic construct
  REGION 1..23: note = ATaRI peptide
MDRMFALEVIVLLGNRSFVKFSK

SEQ ID NO: 6300 - protein, 69 aa, synthetic construct
  REGION 1..69: note = ATaRI peptide
LFMQLVPPGRDHVHLWFGVFTESLTVYQAVSINKENKIKPITAPLLIYILGLKINRKCLLRLEHLWPGL

SEQ ID NO: 6301 - protein, 17 aa, synthetic construct
  REGION 1..17: note = ATaRI peptide
LSPYFVYLGKSHEPRAH

SEQ ID NO: 6302 - protein, 20 aa, synthetic construct
  REGION 1..20: note = ATaRI peptide
PVVDCVVSVSLIPIHYWEFA

SEQ ID NO: 6303 - protein, 13 aa, synthetic construct
  REGION 1..13: note = ATaRI peptide
RLMNETTAGKEDR

SEQ ID NO: 6304 - protein, 14 aa, synthetic construct
  REGION 1..14: note = ATaRI peptide
LRSVLEQTSKYFCD

SEQ ID NO: 6305 - protein, 10 aa, synthetic construct
  REGION 1..10: note = ATaRI peptide
DQNAKEEEVI

SEQ ID NO: 6306 - protein, 15 aa, synthetic construct
  REGION 1..15: note = ATaRI peptide
YEKFVSEDVSLPQYA

SEQ ID NO: 6307 - protein, 12 aa, synthetic construct
  REGION 1..12: note = ATaRI peptide
SSILTSIQVSVC

SEQ ID NO: 6308 - protein, 9 aa, synthetic construct
  REGION 1..9: note = ATaRI peptide
EAIPEPVVR

SEQ ID NO: 6309 - protein, 42 aa, synthetic construct
  REGION 1..42: note = ATaRI peptide
KCNVCVHQVGRPPSHPHLCHVYTRCLAATPTWLSRGTVDRSP

SEQ ID NO: 6310 - protein, 9 aa, synthetic construct
  REGION 1..9: note = ATaRI peptide
QSLLDNLDL

SEQ ID NO: 6311 - protein, 12 aa, synthetic construct
  REGION 1..12: note = ATaRI peptide
PNHRSSAKVRES

SEQ ID NO: 6312 - protein, 15 aa, synthetic construct
  REGION 1..15: note = ATaRI peptide
ISGLLANMGKSCYLL

SEQ ID NO: 6313 - protein, 52 aa, synthetic construct
  REGION 1..52: note = ATaRI peptide
AFLMDAGSVSNLTYPDPHCKLLYCFNLAFGFIPFNISLPEQISYFNLYTVVH

SEQ ID NO: 6314 - protein, 9 aa, synthetic construct
  REGION 1..9: note = ATaRI peptide
NKSKKTENR

SEQ ID NO: 6315 - protein, 26 aa, synthetic construct
  REGION 1..26: note = ATaRI peptide
CSDVEQQVVGTIFRKFPVSLILRWYV

SEQ ID NO: 6316 - protein, 12 aa, synthetic construct
  REGION 1..12: note = ATaRI peptide
KIFIFNQTGMWK

SEQ ID NO: 6317 - protein, 40 aa, synthetic construct
  REGION 1..40: note = ATaRI peptide
EWFNVYNKVTKLPYLGITLIMEFKKLLSSLSSCAAKCHCT

SEQ ID NO: 6318 - protein, 13 aa, synthetic construct
  REGION 1..13: note = ATaRI peptide
TIRMSFVKVSCDL

SEQ ID NO: 6319 - protein, 12 aa, synthetic construct
  REGION 1..12: note = ATaRI peptide
KLQEIFSRGKNG

SEQ ID NO: 6320 - protein, 45 aa, synthetic construct
  REGION 1..45: note = ATaRI peptide
RPRTAPLKGDPAGAIFGLCSGTGLKCLSCSCAAEALTLMESSVIS

SEQ ID NO: 6321 - protein, 33 aa, synthetic construct
  REGION 1..33: note = ATaRI peptide
IGEGAHDEGMLSRIHCFRMVRLCLGNTVLCFHP

SEQ ID NO: 6322 - protein, 9 aa, synthetic construct
  REGION 1..9: note = ATaRI peptide
AALRAPDRR

SEQ ID NO: 6323 - protein, 9 aa, synthetic construct
  REGION 1..9: note = ATaRI peptide
DCWSLLLHR

SEQ ID NO: 6324 - protein, 26 aa, synthetic construct
  REGION 1..26: note = ATaRI peptide
APQDGSPRGAWGPCARRQTENGGGGV

SEQ ID NO: 6325 - protein, 53 aa, synthetic construct
  REGION 1..53: note = ATaRI peptide
KIEFKTRLGEYSFYTSDYAFWMNCTEFNALGRICFSFPPTSFLLSFFLRQCLT

SEQ ID NO: 6326 - protein, 47 aa, synthetic construct
  REGION 1..47: note = ATaRI peptide
KADCPTMEVSEWNPESLSCEPQAWESAWPLPRVPCPPCHQVLFTFTS

SEQ ID NO: 6327 - protein, 61 aa, synthetic construct
  REGION 1..61: note = ATaRI peptide
RSVASREEVSGGSRNRRDEVFLPFPDSVRNMHLLAEKLSSWLIVVEMNKHSLKMTIAACEY

SEQ ID NO: 6328 - protein, 11 aa, synthetic construct
  REGION 1..11: note = ATaRI peptide
TEEREKKDGGC

SEQ ID NO: 6329 - protein, 16 aa, synthetic construct
  REGION 1..16: note = ATaRI peptide
TLWDAISWVRLPQPGP

SEQ ID NO: 6330 - protein, 90 aa, synthetic construct
  REGION 1..90: note = ATaRI peptide
SPLWHPCSCEFSVLGTGGLGWAFLWARKRLWTHLRKRAISSSLPFLSEVRGRGMWGSSIHPGHGPHLPLSVFPFPPITSNQGRPTGSRLL

SEQ ID NO: 6331 - protein, 16 aa, synthetic construct
  REGION 1..16: note = ATaRI peptide
SSLLDPSTGRDPLELP

SEQ ID NO: 6332 - protein, 32 aa, synthetic construct
  REGION 1..32: note = ATaRI peptide
PCCGTPIEVNVLGQTWRPSDLQGCYDYLKKPY

SEQ ID NO: 6333 - protein, 21 aa, synthetic construct
  REGION 1..21: note = ATaRI peptide
VKTVKYFKGEGGVGPGGGGQA

SEQ ID NO: 6334 - protein, 21 aa, synthetic construct
  REGION 1..21: note = ATaRI peptide
GIFMLTFFSKYVCISEPPPTN

SEQ ID NO: 6335 - protein, 20 aa, synthetic construct
  REGION 1..20: note = ATaRI peptide
QLTISIQNVSGHRDRLLLSG

SEQ ID NO: 6336 - protein, 58 aa, synthetic construct
  REGION 1..58: note = ATaRI peptide
LFEQDAEKVKTGEANASVDMGEASAGGFGWKEREKVENGKAILTVCALNQRESFQKWH

SEQ ID NO: 6337 - protein, 9 aa, synthetic construct
  REGION 1..9: note = ATaRI peptide
TSALKTYLR

SEQ ID NO: 6338 - protein, 29 aa, synthetic construct
  REGION 1..29: note = ATaRI peptide
TAGTVFDNGEFLIPSQRYGRGAGARGAHK

SEQ ID NO: 6339 - protein, 39 aa, synthetic construct
  REGION 1..39: note = ATaRI peptide
YVNEVQASGKRAHSICVRCDFFMSSWQFGLFQWDDCKFC

SEQ ID NO: 6340 - protein, 19 aa, synthetic construct
  REGION 1..19: note = ATaRI peptide
AFYKTSEQVRGEVPFLELH

SEQ ID NO: 6341 - protein, 43 aa, synthetic construct
  REGION 1..43: note = ATaRI peptide
VFERSAKQVSAHLVPSLPLNSRAHTCLHREAELDISAILKTTF

SEQ ID NO: 6342 - protein, 64 aa, synthetic construct
  REGION 1..64: note = ATaRI peptide
RDLRECMDVSKFFFFFFACLFRLSISLLFYSYLLVVLRIITIFFCHFFKCKVCFSSRFHVSALL

SEQ ID NO: 6343 - protein, 9 aa, synthetic construct
  REGION 1..9: note = ATaRI peptide
QEIYEFHNK

SEQ ID NO: 6344 - protein, 9 aa, synthetic construct
  REGION 1..9: note = ATaRI peptide
KSSSLKRRQ

SEQ ID NO: 6345 - protein, 30 aa, synthetic construct
  REGION 1..30: note = ATaRI peptide
RDLGYVVEVCIARNLVSSYQFQELSKVVSF

SEQ ID NO: 6346 - protein, 27 aa, synthetic construct
  REGION 1..27: note = ATaRI peptide
EYIDTFFEVRPKIQTESISESFVPTYF

SEQ ID NO: 6347 - protein, 20 aa, synthetic construct
  REGION 1..20: note = ATaRI peptide
MKYQLLLKVRRWRDKLWCQE

SEQ ID NO: 6348 - protein, 14 aa, synthetic construct
  REGION 1..14: note = ATaRI peptide
FLFKNSIKVTCVSV

SEQ ID NO: 6349 - protein, 131 aa, synthetic construct
  REGION 1..131: note = ATaRI peptide
LSNKVSVKVCSGVFRSPCHPSMRERIREGRDSADLKLGLLMTSLPPTSPVPCVSCRVLLGALCWPAQGWVRPTRNQVDPCTLPQVHMWLLKNMVRFANEAQRLGSQKQRRCREAMAQASFSVPALKPRGSG

SEQ ID NO: 6350 - protein, 15 aa, synthetic construct
  REGION 1..15: note = ATaRI peptide
RIAHLDLKVGEAPGR

SEQ ID NO: 6351 - protein, 11 aa, synthetic construct
  REGION 1..11: note = ATaRI peptide
GMEELKKLSKF

SEQ ID NO: 6352 - protein, 29 aa, synthetic construct
  REGION 1..29: note = ATaRI peptide
KDMLLERGVRKQSLGEIFLFCISNINMSC

SEQ ID NO: 6353 - protein, 9 aa, synthetic construct
  REGION 1..9: note = ATaRI peptide
QKATCMKMV

SEQ ID NO: 6354 - protein, 59 aa, synthetic construct
  REGION 1..59: note = ATaRI peptide
ACYVYRKQVRQPRREPPPGCILLGAGEPEQPLTRLDGGVRQWGILGDTAQSRGLGWLEA

SEQ ID NO: 6355 - protein, 24 aa, synthetic construct
  REGION 1..24: note = ATaRI peptide
IFSFFPVPGKEKQNEGSIPVYPHA

SEQ ID NO: 6356 - protein, 17 aa, synthetic construct
  REGION 1..17: note = ATaRI peptide
TFVMRNCAGNGTQLWWN

SEQ ID NO: 6357 - protein, 13 aa, synthetic construct
  REGION 1..13: note = ATaRI peptide
VVEDSWRSGIHFL

SEQ ID NO: 6358 - protein, 38 aa, synthetic construct
  REGION 1..38: note = ATaRI peptide
VDVDEEQAGNHVIHPTFIILKLRPNCNEVHETARMIVF

SEQ ID NO: 6359 - protein, 16 aa, synthetic construct
  REGION 1..16: note = ATaRI peptide
IYLRPMQQVTSFASFR

SEQ ID NO: 6360 - protein, 33 aa, synthetic construct
  REGION 1..33: note = ATaRI peptide
VNGELKSSCKYQVGVQMLGRASALAKSRPCPGP

SEQ ID NO: 6361 - protein, 30 aa, synthetic construct
  REGION 1..30: note = ATaRI peptide
EQAEEWLKVRGLHLTFPPSHPFSLPQASPQ

SEQ ID NO: 6362 - protein, 42 aa, synthetic construct
  REGION 1..42: note = ATaRI peptide
DVPYEKMQVQSLGAAQECGKGHLLALPLSAPFTFCLRKIIFI

SEQ ID NO: 6363 - protein, 16 aa, synthetic construct
  REGION 1..16: note = ATaRI peptide
PEVDELSLVRTYLQQK

SEQ ID NO: 6364 - protein, 42 aa, synthetic construct
  REGION 1..42: note = ATaRI peptide
SPATRRNFRYEQGAAGEAAGSGGSQFPGSQEPQEGGSLGSLL

SEQ ID NO: 6365 - protein, 18 aa, synthetic construct
  REGION 1..18: note = ATaRI peptide
RKRREKAIVSDLGAQSLE

SEQ ID NO: 6366 - protein, 12 aa, synthetic construct
  REGION 1..12: note = ATaRI peptide
NLYSWSLSGKQQ

SEQ ID NO: 6367 - protein, 34 aa, synthetic construct
  REGION 1..34: note = ATaRI peptide
RRSLHAPPGKSRLRGPRRAAGRPRVGCCGSLSLY

SEQ ID NO: 6368 - protein, 22 aa, synthetic construct
  REGION 1..22: note = ATaRI peptide
LEKEGLDPVSNFFFQLFFPLVQ

SEQ ID NO: 6369 - protein, 27 aa, synthetic construct
  REGION 1..27: note = ATaRI peptide
VSVVTVMRVSGFGTEVFGFVWSYLKGS

SEQ ID NO: 6370 - protein, 23 aa, synthetic construct
  REGION 1..23: note = ATaRI peptide
KYSCTVTLVSMQLGGGGLTWRLF

SEQ ID NO: 6371 - protein, 12 aa, synthetic construct
  REGION 1..12: note = ATaRI peptide
VLALKSVEVSAS

SEQ ID NO: 6372 - protein, 33 aa, synthetic construct
  REGION 1..33: note = ATaRI peptide
PFGAEDSKVSVKGSGGYRGFWSRLIGPLFRSGI

SEQ ID NO: 6373 - protein, 74 aa, synthetic construct
  REGION 1..74: note = ATaRI peptide
SSPTEPPVVSHLLRNCHVSSSLPCLALSPRLECSGVISAHCNLCLPGSSSSRASASRVAGITGTHHHTWLIFVF

SEQ ID NO: 6374 - protein, 254 aa, synthetic construct
  REGION 1..254: note = ATaRI peptide
EVKEQSGQVSVRGPCARAACKMWRSAARGPRPVPRRPGRRPEPGPAVLDGAARGTGGAAISAFPLRLQFPWASLSSSGQWVGPESVLAGAELCNSRFPYLHALPGSGYFKFPKSPATWLGSARPPLGQGGCCESRGWIATSPSGERLEKGPYSLLVELELRPLAIVCTETVSFGTRTRGTVISYLINSTVNPVLRVLPGVRMVSTISQPSWSLHSSKVDKSKNHKSDYMLSTAISVKNERDGPGTVAHACNPST

SEQ ID NO: 6375 - protein, 26 aa, synthetic construct
  REGION 1..26: note = ATaRI peptide
APAGTRSQVRPGGGLPLGGPAGPPAA

SEQ ID NO: 6376 - protein, 26 aa, synthetic construct
  REGION 1..26: note = ATaRI peptide
PATQCLTPGERSPYAVVGGAASTAPH

SEQ ID NO: 6377 - protein, 69 aa, synthetic construct
  REGION 1..69: note = ATaRI peptide
KQEGPATQVPGGQGRVMQASGVGPYFHTYPHVLMGWPAIAVTPTLQRSWPHSQRLSGLLATTPQITFEL

SEQ ID NO: 6378 - protein, 17 aa, synthetic construct
  REGION 1..17: note = ATaRI peptide
YSGKFFHTGKWACPCPH

SEQ ID NO: 6379 - protein, 44 aa, synthetic construct
  REGION 1..44: note = ATaRI peptide
ALNKKFAVVSKIPCRAERGGLRAGLEVQTAGLLLLLQSALTDFY

SEQ ID NO: 6380 - protein, 42 aa, synthetic construct
  REGION 1..42: note = ATaRI peptide
FLTVLLNPVSAPQPMAAGEKGLLHSLSAADTGFLEPGKGGEA

SEQ ID NO: 6381 - protein, 48 aa, synthetic construct
  REGION 1..48: note = ATaRI peptide
EEKDPLWQVGGWAAWAGCYRDGTPPLTGTHSRYGLKAQPSCLHTLARM

SEQ ID NO: 6382 - protein, 14 aa, synthetic construct
  REGION 1..14: note = ATaRI peptide
LIIGPQKTGRSLCS

SEQ ID NO: 6383 - protein, 9 aa, synthetic construct
  REGION 1..9: note = ATaRI peptide
HNYHKGIDW

SEQ ID NO: 6384 - protein, 63 aa, synthetic construct
  REGION 1..63: note = ATaRI peptide
LSAYHANQVAAVPDPCEGSHSTGLLWLAESLQLFLTSRGDRYALLGELDPWVYKKILLLLLLF

SEQ ID NO: 6385 - protein, 9 aa, synthetic construct
  REGION 1..9: note = ATaRI peptide
LRNHAHWGR

SEQ ID NO: 6386 - protein, 11 aa, synthetic construct
  REGION 1..11: note = ATaRI peptide
MIYQFIVQVHA

SEQ ID NO: 6387 - protein, 20 aa, synthetic construct
  REGION 1..20: note = ATaRI peptide
IRRDAQRVGTEGRIGHGWAL

SEQ ID NO: 6388 - protein, 56 aa, synthetic construct
  REGION 1..56: note = ATaRI peptide
FNKAQLAEVGRQNCPLKRASIVLLLMVTLILPYLVCLLIVISSRVLEATLYSSLAI

SEQ ID NO: 6389 - protein, 21 aa, synthetic construct
  REGION 1..21: note = ATaRI peptide
EIAHKSVQVSLCGRIGRFEVS

SEQ ID NO: 6390 - protein, 9 aa, synthetic construct
  REGION 1..9: note = ATaRI peptide
LKDYIKRQM

SEQ ID NO: 6391 - protein, 41 aa, synthetic construct
  REGION 1..41: note = ATaRI peptide
EPEYSQIKVRLGHSSECGAWCACIVRRRGSLISCAILGRSL

SEQ ID NO: 6392 - protein, 41 aa, synthetic construct
  REGION 1..41: note = ATaRI peptide
EGRTLDAKVRHSCRAAQSLGSTSLHSSALLLSLALSELRKC

SEQ ID NO: 6393 - protein, 38 aa, synthetic construct
  REGION 1..38: note = ATaRI peptide
HRPRTASIRYLGQWGKSDQAAYGMGGRAMKLTGPRRLV

SEQ ID NO: 6394 - protein, 35 aa, synthetic construct
  REGION 1..35: note = ATaRI peptide
KYRRRCLNGKKCGGQEMSLWARYLDPEYKSWGIRG

SEQ ID NO: 6395 - protein, 43 aa, synthetic construct
  REGION 1..43: note = ATaRI peptide
MKSCKNLKVYDVFLNTSNKKKDRKKADFALLLRVQHAFLSTRC

SEQ ID NO: 6396 - protein, 22 aa, synthetic construct
  REGION 1..22: note = ATaRI peptide
EFRSNLYIGKIFNILSIRKCLQ

SEQ ID NO: 6397 - protein, 24 aa, synthetic construct
  REGION 1..24: note = ATaRI peptide
SCSRAIPQVRLSLLCVSFPSRGHY

SEQ ID NO: 6398 - protein, 41 aa, synthetic construct
  REGION 1..41: note = ATaRI peptide
LARYSNSEVSMQAAGAQARGPRARRGKEQPGKNMDPRNTGE

SEQ ID NO: 6399 - protein, 9 aa, synthetic construct
  REGION 1..9: note = ATaRI peptide
AYYKAMAGR

SEQ ID NO: 6400 - protein, 53 aa, synthetic construct
  REGION 1..53: note = ATaRI peptide
LLKQRHVQVWGAEATLEMEGAGESSCEVSIEIRNQAWVLSARHVASVDFRAWV

SEQ ID NO: 6401 - protein, 9 aa, synthetic construct
  REGION 1..9: note = ATaRI peptide
TNWFKRRAR

SEQ ID NO: 6402 - protein, 41 aa, synthetic construct
  REGION 1..41: note = ATaRI peptide
LDVDYTLFGKSVKNAFHFLLPTTTLFFFSLFFFFLSNSWFS

SEQ ID NO: 6403 - protein, 29 aa, synthetic construct
  REGION 1..29: note = ATaRI peptide
HQAREACMVKPKILKIFFLLFFVLLPSES

SEQ ID NO: 6404 - protein, 42 aa, synthetic construct
  REGION 1..42: note = ATaRI peptide
EIATAKSRVGPLHLCYVLVIGATEVLGHKPTHKTRTDAPARL

SEQ ID NO: 6405 - protein, 19 aa, synthetic construct
  REGION 1..19: note = ATaRI peptide
KEKQDLIKVCKFLLMWVPS

SEQ ID NO: 6406 - protein, 28 aa, synthetic construct
  REGION 1..28: note = ATaRI peptide
SQTDISGSVSRRGRLLGAFHRMAAGRLL

SEQ ID NO: 6407 - protein, 9 aa, synthetic construct
  REGION 1..9: note = ATaRI peptide
ATRIQIALK

SEQ ID NO: 6408 - protein, 9 aa, synthetic construct
  REGION 1..9: note = ATaRI peptide
EPPEVQSFR

SEQ ID NO: 6409 - protein, 71 aa, synthetic construct
  REGION 1..71: note = ATaRI peptide
SAPRGCCSRFGRRRPAGRPERDGAGSDSCPSGFGGGTARRGPSWSSQSGAARSLWEQEGLREEAPIISKPV

SEQ ID NO: 6410 - protein, 11 aa, synthetic construct
  REGION 1..11: note = ATaRI peptide
EKVEIAGPGMT

SEQ ID NO: 6411 - protein, 31 aa, synthetic construct
  REGION 1..31: note = ATaRI peptide
LICDVSRQGEFLGFVPSSSKYYVYHFLESSF

SEQ ID NO: 6412 - protein, 11 aa, synthetic construct
  REGION 1..11: note = ATaRI peptide
IYVVDNGQVSL

SEQ ID NO: 6413 - protein, 19 aa, synthetic construct
  REGION 1..19: note = ATaRI peptide
CVEKDRQTGECLFFFFFFF

SEQ ID NO: 6414 - protein, 30 aa, synthetic construct
  REGION 1..30: note = ATaRI peptide
EVNELKTKVGISAYFSTKYSIFMQPSVNFR

SEQ ID NO: 6415 - protein, 18 aa, synthetic construct
  REGION 1..18: note = ATaRI peptide
LKLKYEPEGIYVSYIFVF

SEQ ID NO: 6416 - protein, 34 aa, synthetic construct
  REGION 1..34: note = ATaRI peptide
PRWMETVKVIINNSSKHMSSSYHEPGTVLSALFK

SEQ ID NO: 6417 - protein, 10 aa, synthetic construct
  REGION 1..10: note = ATaRI peptide
FHDLVVLKVP

SEQ ID NO: 6418 - protein, 24 aa, synthetic construct
  REGION 1..24: note = ATaRI peptide
EHTNFEFQVSISHQSYPWSCPGRL

SEQ ID NO: 6419 - protein, 20 aa, synthetic construct
  REGION 1..20: note = ATaRI peptide
QRSGDFKKVKNEAGNSCQHA

SEQ ID NO: 6420 - protein, 64 aa, synthetic construct
  REGION 1..64: note = ATaRI peptide
IGYFDKGKVICPCPPPVGTLATGRMVLSHTLHPIHPQLCQISLQILTLITSLHFLSISIPSTSM

SEQ ID NO: 6421 - protein, 127 aa, synthetic construct
  REGION 1..127: note = ATaRI peptide
ITDEVQLLGRSRARRPLGTWQRCLCAWVCVSLVATVTYGELLLPGVALSALRLLTNLFLTTTYPPVLQMRKLRHREVKSFVLQSQDWNPHGLNPCSGPGSFTHSFLHFLVYLLIHSFIHSLTHSFTS

SEQ ID NO: 6422 - protein, 40 aa, synthetic construct
  REGION 1..40: note = ATaRI peptide
VAGQLRLLGESPAPRARGPAPPPSRAVSPRCALPRPRPSR

SEQ ID NO: 6423 - protein, 9 aa, synthetic construct
  REGION 1..9: note = ATaRI peptide
KEKNKLASR

SEQ ID NO: 6424 - protein, 27 aa, synthetic construct
  REGION 1..27: note = ATaRI peptide
QQLRHRIQVGILNSVNEGGSVLGISSA

SEQ ID NO: 6425 - protein, 46 aa, synthetic construct
  REGION 1..46: note = ATaRI peptide
PTTPVTFSVSICMFFLNIWVPTQCLFPSLIKMTSPIRVHLHIYYGT

SEQ ID NO: 6426 - protein, 9 aa, synthetic construct
  REGION 1..9: note = ATaRI peptide
ENHKKQMLR

SEQ ID NO: 6427 - protein, 12 aa, synthetic construct
  REGION 1..12: note = ATaRI peptide
SPTIKDKPVSVV

SEQ ID NO: 6428 - protein, 33 aa, synthetic construct
  REGION 1..33: note = ATaRI peptide
GVPRPLRAGMIKQTTNSLPYSARNMKIFRINFS

SEQ ID NO: 6429 - protein, 9 aa, synthetic construct
  REGION 1..9: note = ATaRI peptide
CDKQPHNVR

SEQ ID NO: 6430 - protein, 33 aa, synthetic construct
  REGION 1..33: note = ATaRI peptide
VVSRPQPRASYFIAGISPFFIYKYIHLVILISL

SEQ ID NO: 6431 - protein, 21 aa, synthetic construct
  REGION 1..21: note = ATaRI peptide
FYQGTYSQVSAINHIDANLPK

SEQ ID NO: 6432 - protein, 70 aa, synthetic construct
  REGION 1..70: note = ATaRI peptide
NIVFWVSAGSAPCPVLGGGGRGRFSLLLGETTPCPKSLELGTIPPLLPHPRPLPGPPEVATEARIAGGGS

SEQ ID NO: 6433 - protein, 54 aa, synthetic construct
  REGION 1..54: note = ATaRI peptide
SCCVRDPAVSGAGGGEVRDFPVHRLWRNLPQGPAPLCPALGAWMLGDVILHGWH

SEQ ID NO: 6434 - protein, 9 aa, synthetic construct
  REGION 1..9: note = ATaRI peptide
VSGFKHKNQ

SEQ ID NO: 6435 - protein, 51 aa, synthetic construct
  REGION 1..51: note = ATaRI peptide
KVQEQVHKVCCKISANFHWSLGNCNFIFNVILYLHETIISLTEILFFILSF

SEQ ID NO: 6436 - protein, 15 aa, synthetic construct
  REGION 1..15: note = ATaRI peptide
GDLGLSKKVCYFCKF

SEQ ID NO: 6437 - protein, 37 aa, synthetic construct
  REGION 1..37: note = ATaRI peptide
ALKENVCQVEKCLPTCVFIACSSLKGNPLHLFMMVSW

SEQ ID NO: 6438 - protein, 9 aa, synthetic construct
  REGION 1..9: note = ATaRI peptide
VWVKVGRYR

SEQ ID NO: 6439 - protein, 12 aa, synthetic construct
  REGION 1..12: note = ATaRI peptide
RTKTDIKKVRKS

SEQ ID NO: 6440 - protein, 34 aa, synthetic construct
  REGION 1..34: note = ATaRI peptide
KDAASVEKVSWVLDFSSLSGNDLNSKRTPFLKHD

SEQ ID NO: 6441 - protein, 51 aa, synthetic construct
  REGION 1..51: note = ATaRI peptide
GQREARPQVSSLPSQIPVDGFSPLTGVLHPGPSPARMEPKSFSLGGAGPPS

SEQ ID NO: 6442 - protein, 9 aa, synthetic construct
  REGION 1..9: note = ATaRI peptide
WSSPRRTSR

SEQ ID NO: 6443 - protein, 63 aa, synthetic construct
  REGION 1..63: note = ATaRI peptide
AVDLLSAQVRVSEGCLFHQLASGFRDGRHVSRLCPGTFWSNQNDEESGTSKVFPSVLGLARGC

SEQ ID NO: 6444 - protein, 10 aa, synthetic construct
  REGION 1..10: note = ATaRI peptide
EVPSDTRLGK

SEQ ID NO: 6445 - protein, 13 aa, synthetic construct
  REGION 1..13: note = ATaRI peptide
TNSKLQEEVCKFY

SEQ ID NO: 6446 - protein, 36 aa, synthetic construct
  REGION 1..36: note = ATaRI peptide
LQMFHKAQVGVGFVSMAQPGFCCSPVLCHSSYKMSE

SEQ ID NO: 6447 - protein, 32 aa, synthetic construct
  REGION 1..32: note = ATaRI peptide
RSLVPPGQVSMSLCFLFLCCRHFSEVTHYFGC

SEQ ID NO: 6448 - protein, 9 aa, synthetic construct
  REGION 1..9: note = ATaRI peptide
WRLPGALPR

SEQ ID NO: 6449 - protein, 10 aa, synthetic construct
  REGION 1..10: note = ATaRI peptide
EPDRTRPTGW

SEQ ID NO: 6450 - protein, 25 aa, synthetic construct
  REGION 1..25: note = ATaRI peptide
NADIVSLQVSQTEDSQPSIDKGRSN

SEQ ID NO: 6451 - protein, 9 aa, synthetic construct
  REGION 1..9: note = ATaRI peptide
CAIFFKTEK

SEQ ID NO: 6452 - protein, 22 aa, synthetic construct
  REGION 1..22: note = ATaRI peptide
RKESIEMPCECPSLPVKLTSSD

SEQ ID NO: 6453 - protein, 13 aa, synthetic construct
  REGION 1..13: note = ATaRI peptide
DLNSLPDSGKKIM

SEQ ID NO: 6454 - protein, 26 aa, synthetic construct
  REGION 1..26: note = ATaRI peptide
TNYTFDFKVCLETDKLFKPVFYWQVF

SEQ ID NO: 6455 - protein, 10 aa, synthetic construct
  REGION 1..10: note = ATaRI peptide
WRAAQKYAGN

SEQ ID NO: 6456 - protein, 32 aa, synthetic construct
  REGION 1..32: note = ATaRI peptide
ITVIATEISKSYLIPLLSPINRLSVPARAGGA

SEQ ID NO: 6457 - protein, 39 aa, synthetic construct
  REGION 1..39: note = ATaRI peptide
CEKAKADQVSFIKKYIQVEHQINLDLLIIQMIHRAEGEL

SEQ ID NO: 6458 - protein, 45 aa, synthetic construct
  REGION 1..45: note = ATaRI peptide
YDEDSGFHRHVIGKGKNILIAFLDNCEYSLIVRQNLKSSSLLKLI

SEQ ID NO: 6459 - protein, 16 aa, synthetic construct
  REGION 1..16: note = ATaRI peptide
PFKEMFTQVNNCVFNT

SEQ ID NO: 6460 - protein, 9 aa, synthetic construct
  REGION 1..9: note = ATaRI peptide
VQRWASNPG

SEQ ID NO: 6461 - protein, 19 aa, synthetic construct
  REGION 1..19: note = ATaRI peptide
RNIQASERGEQGRVPGPGP

SEQ ID NO: 6462 - protein, 11 aa, synthetic construct
  REGION 1..11: note = ATaRI peptide
QGLNMEDYVSA

SEQ ID NO: 6463 - protein, 47 aa, synthetic construct
  REGION 1..47: note = ATaRI peptide
QTWNRTFEGGDSIYKAITWGQMSCCFSGSVFLSCSCGAFPASCFSQL

SEQ ID NO: 6464 - protein, 11 aa, synthetic construct
  REGION 1..11: note = ATaRI peptide
DVEAGTQEVST

SEQ ID NO: 6465 - protein, 9 aa, synthetic construct
  REGION 1..9: note = ATaRI peptide
YYDMYLEEG

SEQ ID NO: 6466 - protein, 18 aa, synthetic construct
  REGION 1..18: note = ATaRI peptide
RDHRKIGRVCSRTMMCLD

SEQ ID NO: 6467 - protein, 33 aa, synthetic construct
  REGION 1..33: note = ATaRI peptide
GKTALHYAGNFHSPICLLLPLETPTFLFPYSGH

SEQ ID NO: 6468 - protein, 23 aa, synthetic construct
  REGION 1..23: note = ATaRI peptide
SPINLKDLVSTRWSLEAEVDIGF

SEQ ID NO: 6469 - protein, 62 aa, synthetic construct
  REGION 1..62: note = ATaRI peptide
VNSRNKSGRYSRIRQKSCDFSDTHILRVFQNITAIFWIICYKGFLTSYLFKVLLFLIIKNLC

SEQ ID NO: 6470 - protein, 64 aa, synthetic construct
  REGION 1..64: note = ATaRI peptide
PPPISPTQVKTKANQQSINAPQESHKFVILFRPKRNVLELTFKCIFKIFLSSFKLQIVVRRIDD

SEQ ID NO: 6471 - protein, 11 aa, synthetic construct
  REGION 1..11: note = ATaRI peptide
KELQDKLQVYK

SEQ ID NO: 6472 - protein, 52 aa, synthetic construct
  REGION 1..52: note = ATaRI peptide
KQLQNQLAVSGLVSAAWFGVEGLADFLPSQLLGQVGVNKKIPSPKECTSMSS

SEQ ID NO: 6473 - protein, 106 aa, synthetic construct
  REGION 1..106: note = ATaRI peptide
RQQKLKQAKCVACVGPSSQYRWGSEAAPEVPYMFMLGSVISLALSCFFFFFKLWHWIVFFHLLCKNYYYFWDSVILSPRLECNGAISAHCNLRLQVQVILLSQPPK

SEQ ID NO: 6474 - protein, 21 aa, synthetic construct
  REGION 1..21: note = ATaRI peptide
HELKDEEDGNIIFILFIFFVF

SEQ ID NO: 6475 - protein, 9 aa, synthetic construct
  REGION 1..9: note = ATaRI peptide
DKSFKTEKA

SEQ ID NO: 6476 - protein, 11 aa, synthetic construct
  REGION 1..11: note = ATaRI peptide
EMEDAPKQKYF

SEQ ID NO: 6477 - protein, 22 aa, synthetic construct
  REGION 1..22: note = ATaRI peptide
MKKKKEAEVSDNPLILCCVYLN

SEQ ID NO: 6478 - protein, 15 aa, synthetic construct
  REGION 1..15: note = ATaRI peptide
LIAHEAQEVRYLDEG

SEQ ID NO: 6479 - protein, 69 aa, synthetic construct
  REGION 1..69: note = ATaRI peptide
QDALDREAVNTIFLRNLSKVTFVSFYQVVVNKAIFCCQSSNKIFFCMINLLSAHFYFCITPSTGHVAAT

SEQ ID NO: 6480 - protein, 9 aa, synthetic construct
  REGION 1..9: note = ATaRI peptide
DQPLAEHFR

SEQ ID NO: 6481 - protein, 9 aa, synthetic construct
  REGION 1..9: note = ATaRI peptide
LRLSDPIVK

SEQ ID NO: 6482 - protein, 11 aa, synthetic construct
  REGION 1..11: note = ATaRI peptide
SSCSRYERCET

SEQ ID NO: 6483 - protein, 9 aa, synthetic construct
  REGION 1..9: note = ATaRI peptide
KEISPFGLW

SEQ ID NO: 6484 - protein, 16 aa, synthetic construct
  REGION 1..16: note = ATaRI peptide
MVHRLSSDVCNILSLR

SEQ ID NO: 6485 - protein, 22 aa, synthetic construct
  REGION 1..22: note = ATaRI peptide
AGSEGTPKGTTVTKISFCIFYI

SEQ ID NO: 6486 - protein, 27 aa, synthetic construct
  REGION 1..27: note = ATaRI peptide
EDMDFTAFGKINLKYIYTYSKCLNCIL

SEQ ID NO: 6487 - protein, 46 aa, synthetic construct
  REGION 1..46: note = ATaRI peptide
KLSTLLNHVSLRSILLILPLMLLRSIVVPHFSIVSFSIFSVTYSQL

SEQ ID NO: 6488 - protein, 19 aa, synthetic construct
  REGION 1..19: note = ATaRI peptide
LTDTTILQVRFFGKHFVYF

SEQ ID NO: 6489 - protein, 9 aa, synthetic construct
  REGION 1..9: note = ATaRI peptide
SKRSLRNFR

SEQ ID NO: 6490 - protein, 9 aa, synthetic construct
  REGION 1..9: note = ATaRI peptide
NFLSIFLKK

SEQ ID NO: 6491 - protein, 11 aa, synthetic construct
  REGION 1..11: note = ATaRI peptide
LSLLGRLLVRV

SEQ ID NO: 6492 - protein, 11 aa, synthetic construct
  REGION 1..11: note = ATaRI peptide
SIERILKQVLR

SEQ ID NO: 6493 - protein, 51 aa, synthetic construct
  REGION 1..51: note = ATaRI peptide
SFDIYLTQVNWIRIPYTVILIFLILDACEQYIISFIVEYRYLKDHRCSICF

SEQ ID NO: 6494 - protein, 21 aa, synthetic construct
  REGION 1..21: note = ATaRI peptide
VNDEEGIKVVLTVLNLFFINV

SEQ ID NO: 6495 - protein, 23 aa, synthetic construct
  REGION 1..23: note = ATaRI peptide
KILNITDVVRRTGTRVWSLLIQT

SEQ ID NO: 6496 - protein, 17 aa, synthetic construct
  REGION 1..17: note = ATaRI peptide
QTKAIIGLGKSKFLYNL

SEQ ID NO: 6497 - protein, 16 aa, synthetic construct
  REGION 1..16: note = ATaRI peptide
NLLQSFKEVSYTHYYS

SEQ ID NO: 6498 - protein, 26 aa, synthetic construct
  REGION 1..26: note = ATaRI peptide
RDCSKSSSRCLIFRKTSIKLSVSRCL

SEQ ID NO: 6499 - protein, 13 aa, synthetic construct
  REGION 1..13: note = ATaRI peptide
TLKHGTKTVSLKI

SEQ ID NO: 6500 - protein, 26 aa, synthetic construct
  REGION 1..26: note = ATaRI peptide
PEPPVAGPGDCDPASDLQRGFRGRVG

SEQ ID NO: 6501 - protein, 9 aa, synthetic construct
  REGION 1..9: note = ATaRI peptide
SQSYTLFES

SEQ ID NO: 6502 - protein, 53 aa, synthetic construct
  REGION 1..53: note = ATaRI peptide
TTSTVISTGKKKLPYHRIAIFTLKKVQVGFLDYFTDFDCAKLVILKRQIQHGC

SEQ ID NO: 6503 - protein, 29 aa, synthetic construct
  REGION 1..29: note = ATaRI peptide
KTGYSQELGKFKACNVPHVQTCSEQFIDS

SEQ ID NO: 6504 - protein, 13 aa, synthetic construct
  REGION 1..13: note = ATaRI peptide
RFEKAVLSGDIYF

SEQ ID NO: 6505 - protein, 23 aa, synthetic construct
  REGION 1..23: note = ATaRI peptide
ILSLIKFKVNVGKLYVYHIPIKD

SEQ ID NO: 6506 - protein, 9 aa, synthetic construct
  REGION 1..9: note = ATaRI peptide
PTITNNLFR

SEQ ID NO: 6507 - protein, 47 aa, synthetic construct
  REGION 1..47: note = ATaRI peptide
KQLEKWHRVTSYLNKVEFVCFYLLKLICEFRGWFFYISVLKLIRLNI

SEQ ID NO: 6508 - protein, 18 aa, synthetic construct
  REGION 1..18: note = ATaRI peptide
CIAIICELGQNFLQVMKM

SEQ ID NO: 6509 - protein, 33 aa, synthetic construct
  REGION 1..33: note = ATaRI peptide
LSEAAGEDGEGAEEREAGGADGAKVLALDGCEG

SEQ ID NO: 6510 - protein, 14 aa, synthetic construct
  REGION 1..14: note = ATaRI peptide
DTAKLLSAGNVISH

SEQ ID NO: 6511 - protein, 9 aa, synthetic construct
  REGION 1..9: note = ATaRI peptide
AIVRGFDTR

SEQ ID NO: 6512 - protein, 20 aa, synthetic construct
  REGION 1..20: note = ATaRI peptide
TLPAIVFQVPPAGDWHSSVS

SEQ ID NO: 6513 - protein, 21 aa, synthetic construct
  REGION 1..21: note = ATaRI peptide
VIFHRIATGNSSIIFYTRLIF

SEQ ID NO: 6514 - protein, 21 aa, synthetic construct
  REGION 1..21: note = ATaRI peptide
SSSSSQLAVRKYFHLEFLNVS

SEQ ID NO: 6515 - protein, 30 aa, synthetic construct
  REGION 1..30: note = ATaRI peptide
QMLAFNPRVSCYHGTPITKFSLTITTILRL

SEQ ID NO: 6516 - protein, 51 aa, synthetic construct
  REGION 1..51: note = ATaRI peptide
TSIREMTQVSMSSGLVQYIFKMSESSSYVVKCRLLYNTYHLKICAVLRCFN

SEQ ID NO: 6517 - protein, 26 aa, synthetic construct
  REGION 1..26: note = ATaRI peptide
PLAHPLLQWYKILVFLLMKTASFSTA

SEQ ID NO: 6518 - protein, 9 aa, synthetic construct
  REGION 1..9: note = ATaRI peptide
LFGSTFAFQ

SEQ ID NO: 6519 - protein, 32 aa, synthetic construct
  REGION 1..32: note = ATaRI peptide
VASNTRLQVDFLNAFTRLHSSSELRFSKQPCC

SEQ ID NO: 6520 - protein, 10 aa, synthetic construct
  REGION 1..10: note = ATaRI peptide
SKSSNTSQVL

SEQ ID NO: 6521 - protein, 28 aa, synthetic construct
  REGION 1..28: note = ATaRI peptide
KEDTIYEAGKQNNYSKYFWVEDNIFALA

SEQ ID NO: 6522 - protein, 19 aa, synthetic construct
  REGION 1..19: note = ATaRI peptide
NLVFSGIEVNFQFFIYLFS

SEQ ID NO: 6523 - protein, 21 aa, synthetic construct
  REGION 1..21: note = ATaRI peptide
TCEKLNLQSKFKFTCKACDLS

SEQ ID NO: 6524 - protein, 23 aa, synthetic construct
  REGION 1..23: note = ATaRI peptide
NMGTGGFLVSVYFTNHYSSQEST

SEQ ID NO: 6525 - protein, 16 aa, synthetic construct
  REGION 1..16: note = ATaRI peptide
DIGPTKTQVWLTEMHN

SEQ ID NO: 6526 - protein, 24 aa, synthetic construct
  REGION 1..24: note = ATaRI peptide
GEQIFSIEGKKNNLLSRIFFKMFK

SEQ ID NO: 6527 - protein, 22 aa, synthetic construct
  REGION 1..22: note = ATaRI peptide
SADYSSQNVRISDSFKPCCHLA

SEQ ID NO: 6528 - protein, 13 aa, synthetic construct
  REGION 1..13: note = ATaRI peptide
IQAHRGDQVNLTV

SEQ ID NO: 6529 - protein, 10 aa, synthetic construct
  REGION 1..10: note = ATaRI peptide
PTKQNNQVGA

SEQ ID NO: 6530 - protein, 12 aa, synthetic construct
  REGION 1..12: note = ATaRI peptide
NFRHTKELVRTS

SEQ ID NO: 6531 - protein, 15 aa, synthetic construct
  REGION 1..15: note = ATaRI peptide
IWNGTFASVSISFIC

SEQ ID NO: 6532 - protein, 46 aa, synthetic construct
  REGION 1..46: note = ATaRI peptide
LITVDEKLVRIFYYTLLWFCLQGYFCTIDIQYGVPGFQESDLNLNF

SEQ ID NO: 6533 - protein, 9 aa, synthetic construct
  REGION 1..9: note = ATaRI peptide
KAELEEKKV

SEQ ID NO: 6534 - protein, 36 aa, synthetic construct
  REGION 1..36: note = ATaRI peptide
EAKVKKLQGKWHYCYLKFSVSTKITGNCMRRYFLIK

SEQ ID NO: 6535 - protein, 13 aa, synthetic construct
  REGION 1..13: note = ATaRI peptide
SLPSSFAPVSFAL

SEQ ID NO: 6536 - protein, 36 aa, synthetic construct
  REGION 1..36: note = ATaRI peptide
YEFSTTKKVCGCSFLSALGITCPQRQMLFTVSKMCR

SEQ ID NO: 6537 - protein, 13 aa, synthetic construct
  REGION 1..13: note = ATaRI peptide
FCYSLLKEGMLRL

SEQ ID NO: 6538 - protein, 24 aa, synthetic construct
  REGION 1..24: note = ATaRI peptide
RAFLNWEKVSHISVSYSILLLDII

SEQ ID NO: 6539 - protein, 15 aa, synthetic construct
  REGION 1..15: note = ATaRI peptide
IWTHDNIIRLVILLI

SEQ ID NO: 6540 - protein, 9 aa, synthetic construct
  REGION 1..9: note = ATaRI peptide
EESITEDLR

SEQ ID NO: 6541 - protein, 20 aa, synthetic construct
  REGION 1..20: note = ATaRI peptide
PRVGKAAKVCTLGNTVYIVS

SEQ ID NO: 6542 - protein, 20 aa, synthetic construct
  REGION 1..20: note = ATaRI peptide
SCLVMTTEVIHVVPHLTFRF

SEQ ID NO: 6543 - protein, 23 aa, synthetic construct
  REGION 1..23: note = ATaRI peptide
EIHYMRDSGIFSVEMYIMYFPSE

SEQ ID NO: 6544 - protein, 92 aa, synthetic construct
  REGION 1..92: note = ATaRI peptide
WICHLHKQVFFPPFLMSSIFKMLQISLALLSLCFSPDVVQNNKKNILMVNCFSNQAAYQNQLTDFLEMLISEPHLKPTISKSQVIVPWELQF

SEQ ID NO: 6545 - protein, 28 aa, synthetic construct
  REGION 1..28: note = ATaRI peptide
KGRKGGTKGNLELCFERILHVNCIFRLL

SEQ ID NO: 6546 - protein, 20 aa, synthetic construct
  REGION 1..20: note = ATaRI peptide
MTKLDFNTGTTSFQYHFNVM

SEQ ID NO: 6547 - protein, 15 aa, synthetic construct
  REGION 1..15: note = ATaRI peptide
QSVLKSIQVCVNFIS

SEQ ID NO: 6548 - protein, 9 aa, synthetic construct
  REGION 1..9: note = ATaRI peptide
GRVACEISR

SEQ ID NO: 6549 - protein, 21 aa, synthetic construct
  REGION 1..21: note = ATaRI peptide
AGPLRQMQVRFFFFFFELHIL

SEQ ID NO: 6550 - protein, 24 aa, synthetic construct
  REGION 1..24: note = ATaRI peptide
LHHHCMSICMWLFFSLCLLNTVAL

SEQ ID NO: 6551 - protein, 37 aa, synthetic construct
  REGION 1..37: note = ATaRI peptide
DLAEPWIQVSSSLFFISQRNIYRSINVFVSFPQLFII

SEQ ID NO: 6552 - protein, 9 aa, synthetic construct
  REGION 1..9: note = ATaRI peptide
LVKCADANR

SEQ ID NO: 6553 - protein, 13 aa, synthetic construct
  REGION 1..13: note = ATaRI peptide
NLFIEWMAGMLMF

SEQ ID NO: 6554 - protein, 36 aa, synthetic construct
  REGION 1..36: note = ATaRI peptide
QIIHRDVKGENSSNYYLVTIKKLILKFGARHSGSHL

SEQ ID NO: 6555 - protein, 12 aa, synthetic construct
  REGION 1..12: note = ATaRI peptide
NHLALIFKVIVR

SEQ ID NO: 6556 - protein, 16 aa, synthetic construct
  REGION 1..16: note = ATaRI peptide
KPAAPPTKVSSKLPQM

SEQ ID NO: 6557 - protein, 23 aa, synthetic construct
  REGION 1..23: note = ATaRI peptide
ESRAGSEKVIEFIAILDLTLICH

SEQ ID NO: 6558 - protein, 27 aa, synthetic construct
  REGION 1..27: note = ATaRI peptide
EFQVISEQVRKPESYNFTFKLPLFRTI

SEQ ID NO: 6559 - protein, 9 aa, synthetic construct
  REGION 1..9: note = ATaRI peptide
QLNLLFAKV

SEQ ID NO: 6560 - protein, 113 aa, synthetic construct
  REGION 1..113: note = ATaRI peptide
LLPKLQQLGRHQAGPRSCFCPRGVWESGSRSGCLCAQRHMLDSFWNGELVFYAGGLSSCRHTAREALCLHRTGLEVEHPGRAQGWGRGSTAPDQAATSCSGSPRHGCWTWARS

SEQ ID NO: 6561 - protein, 21 aa, synthetic construct
  REGION 1..21: note = ATaRI peptide
VPASLKEGRYERKCYGHPECF

SEQ ID NO: 6562 - protein, 47 aa, synthetic construct
  REGION 1..47: note = ATaRI peptide
YLENQVIKVSIGNSSLQFPGRGVLWAYPHTCTLILLYLIKNIYSSLS

SEQ ID NO: 6563 - protein, 16 aa, synthetic construct
  REGION 1..16: note = ATaRI peptide
RERWLQKQVIFFKRVY

SEQ ID NO: 6564 - protein, 16 aa, synthetic construct
  REGION 1..16: note = ATaRI peptide
ISRVFFQTGNNSLSLT

SEQ ID NO: 6565 - protein, 12 aa, synthetic construct
  REGION 1..12: note = ATaRI peptide
RKAFHLFGGKEI

SEQ ID NO: 6566 - protein, 11 aa, synthetic construct
  REGION 1..11: note = ATaRI peptide
PHKIKSCEVGA

SEQ ID NO: 6567 - protein, 9 aa, synthetic construct
  REGION 1..9: note = ATaRI peptide
KKLKPKGTK

SEQ ID NO: 6568 - protein, 18 aa, synthetic construct
  REGION 1..18: note = ATaRI peptide
GDAPDLVDVSIYFGINIV

SEQ ID NO: 6569 - protein, 34 aa, synthetic construct
  REGION 1..34: note = ATaRI peptide
KGTSREDQVTSKTQIHTELIVFLLFLSVSKWSLI

SEQ ID NO: 6570 - protein, 25 aa, synthetic construct
  REGION 1..25: note = ATaRI peptide
ATLAKKRKGSCRHSTGTNWSAASAE

SEQ ID NO: 6571 - protein, 9 aa, synthetic construct
  REGION 1..9: note = ATaRI peptide
DMINMLKLG

SEQ ID NO: 6572 - protein, 24 aa, synthetic construct
  REGION 1..24: note = ATaRI peptide
HTFHRIIKVSYINFMSYKKYCIIT

SEQ ID NO: 6573 - protein, 9 aa, synthetic construct
  REGION 1..9: note = ATaRI peptide
MLTLPQNFG

SEQ ID NO: 6574 - protein, 9 aa, synthetic construct
  REGION 1..9: note = ATaRI peptide
EVKEIGTHM

SEQ ID NO: 6575 - protein, 25 aa, synthetic construct
  REGION 1..25: note = ATaRI peptide
FRKFFKFQVLNMTMVNSFYMPFSSW

SEQ ID NO: 6576 - protein, 24 aa, synthetic construct
  REGION 1..24: note = ATaRI peptide
ADVEVKYIGGSDAEAYQCFTLWTS

SEQ ID NO: 6577 - protein, 10 aa, synthetic construct
  REGION 1..10: note = ATaRI peptide
AFNTRCKEVL

SEQ ID NO: 6578 - protein, 10 aa, synthetic construct
  REGION 1..10: note = ATaRI peptide
QFYLDLYPRY

SEQ ID NO: 6579 - protein, 10 aa, synthetic construct
  REGION 1..10: note = ATaRI peptide
ILGVAATPGM

SEQ ID NO: 6580 - protein, 9 aa, synthetic construct
  REGION 1..9: note = ATaRI peptide
EFLPANFGR

SEQ ID NO: 6581 - protein, 11 aa, synthetic construct
  REGION 1..11: note = ATaRI peptide
NRLTFIPGVCI

SEQ ID NO: 6582 - protein, 15 aa, synthetic construct
  REGION 1..15: note = ATaRI peptide
DEREAPPRVSLFFIL

SEQ ID NO: 6583 - protein, 26 aa, synthetic construct
  REGION 1..26: note = ATaRI peptide
INKDVGVKVRKFKRINQSLFQVLIFK

SEQ ID NO: 6584 - protein, 9 aa, synthetic construct
  REGION 1..9: note = ATaRI peptide
VNHDDVFEV

SEQ ID NO: 6585 - protein, 9 aa, synthetic construct
  REGION 1..9: note = ATaRI peptide
VALSNNKKG

SEQ ID NO: 6586 - protein, 21 aa, synthetic construct
  REGION 1..21: note = ATaRI peptide
HIDINSKIRCVNLFYSFLFIQ

SEQ ID NO: 6587 - protein, 22 aa, synthetic construct
  REGION 1..22: note = ATaRI peptide
QPGDKIIQVIKINLFFFHFITL

SEQ ID NO: 6588 - protein, 100 aa, synthetic construct
  REGION 1..100: note = ATaRI peptide
PTPNPLTTVSTISWLMKEVNVQLCDQLNRELQIICIWIFFFFFFLIERIRNHCLNFFFHFISDLTLRFGFTPEVIGDSFKFENPNRLFTRKSVIKTQYFR

SEQ ID NO: 6589 - protein, 9 aa, synthetic construct
  REGION 1..9: note = ATaRI peptide
YSFSCSIKV

SEQ ID NO: 6590 - protein, 10 aa, synthetic construct
  REGION 1..10: note = ATaRI peptide
CMVMEYVEGI

SEQ ID NO: 6591 - protein, 13 aa, synthetic construct
  REGION 1..13: note = ATaRI peptide
VHRDLKPDKYVHK

SEQ ID NO: 6592 - protein, 25 aa, synthetic construct
  REGION 1..25: note = ATaRI peptide
ELFGQVISGKYHQELSLGHCWEAAI

SEQ ID NO: 6593 - protein, 26 aa, synthetic construct
  REGION 1..26: note = ATaRI peptide
TISSSTLSGKPRAIVPAVLLTTLSVS

SEQ ID NO: 6594 - protein, 15 aa, synthetic construct
  REGION 1..15: note = ATaRI peptide
ALSLMIPGGREILLA

SEQ ID NO: 6595 - protein, 112 aa, synthetic construct
  REGION 1..112: note = ATaRI peptide
KDLWPTADVSMFFGVLCRTSRASKFKYPVMMMCRLDPHRPFLVGPRQQFSKCALRRPPLPGMHGPRRTCTCCLRHLRWPHIFVMLARTQVRRPSAEGFVGFFFFFFGRGRMV

SEQ ID NO: 6596 - protein, 62 aa, synthetic construct
  REGION 1..62: note = ATaRI peptide
EFIKNYMKVLCLVTQRGESAGLECLCLVASYDVYSCQLHTQVFRNTDYTYIISPTILFLEIL

SEQ ID NO: 6597 - protein, 35 aa, synthetic construct
  REGION 1..35: note = ATaRI peptide
CIEDPLLPGKGALISTAESWASLGDVLVTGPVLGL

SEQ ID NO: 6598 - protein, 18 aa, synthetic construct
  REGION 1..18: note = ATaRI peptide
KAHPSPGMGERLIHLCSS

SEQ ID NO: 6599 - protein, 50 aa, synthetic construct
  REGION 1..50: note = ATaRI peptide
QGCYACSVVYVSPANFSLQHLMKRCFIYSFIEFWGQRFDIVLVLNKLTVQ

SEQ ID NO: 6600 - protein, 15 aa, synthetic construct
  REGION 1..15: note = ATaRI peptide
KLSPEPILVNLFLPL

SEQ ID NO: 6601 - protein, 24 aa, synthetic construct
  REGION 1..24: note = ATaRI peptide
SEFHLRPMVRPWLPLLIIQGPGAL

SEQ ID NO: 6602 - protein, 24 aa, synthetic construct
  REGION 1..24: note = ATaRI peptide
LSHPNIIGVSMIKTVTGIWDSAFS

SEQ ID NO: 6603 - protein, 28 aa, synthetic construct
  REGION 1..28: note = ATaRI peptide
HQHWILHRVRFLILLLYTSQVLYSQFGT

SEQ ID NO: 6604 - protein, 19 aa, synthetic construct
  REGION 1..19: note = ATaRI peptide
TPTEEQWPVSLYAFSLKCN

SEQ ID NO: 6605 - protein, 39 aa, synthetic construct
  REGION 1..39: note = ATaRI peptide
CARITATQVFWCIFFILGNIKIILTVALIKIEFHKINIF

SEQ ID NO: 6606 - protein, 11 aa, synthetic construct
  REGION 1..11: note = ATaRI peptide
IVTIEANKVSL

SEQ ID NO: 6607 - protein, 19 aa, synthetic construct
  REGION 1..19: note = ATaRI peptide
DILSGDWNVRPFDLKCLCL

SEQ ID NO: 6608 - protein, 28 aa, synthetic construct
  REGION 1..28: note = ATaRI peptide
QWFLINKKVKKKKKILYFQYVNFMVREL

SEQ ID NO: 6609 - protein, 9 aa, synthetic construct
  REGION 1..9: note = ATaRI peptide
YLPDNNPMT

SEQ ID NO: 6610 - protein, 21 aa, synthetic construct
  REGION 1..21: note = ATaRI peptide
GSIILDEERYLEKRKSEIVVT

SEQ ID NO: 6611 - protein, 11 aa, synthetic construct
  REGION 1..11: note = ATaRI peptide
GWRIDKAFRKY

SEQ ID NO: 6612 - protein, 37 aa, synthetic construct
  REGION 1..37: note = ATaRI peptide
TKPRKNVKGIDFKRKCDSLLSSNKLAILSLRPLRVHV

SEQ ID NO: 6613 - protein, 21 aa, synthetic construct
  REGION 1..21: note = ATaRI peptide
PSKGEKHKSKFLTYLKSLYIT

SEQ ID NO: 6614 - protein, 25 aa, synthetic construct
  REGION 1..25: note = ATaRI peptide
NESCADRDVSTLIPPHIFGKQVHEP

SEQ ID NO: 6615 - protein, 21 aa, synthetic construct
  REGION 1..21: note = ATaRI peptide
EQFSDINLRYKCVFKEKDIKL

SEQ ID NO: 6616 - protein, 9 aa, synthetic construct
  REGION 1..9: note = ATaRI peptide
KNDSVVSVG

SEQ ID NO: 6617 - protein, 31 aa, synthetic construct
  REGION 1..31: note = ATaRI peptide
TEKKVLTVVSYCYVIKFSLLMHLKCQVIAQT

SEQ ID NO: 6618 - protein, 9 aa, synthetic construct
  REGION 1..9: note = ATaRI peptide
EQYLNKLTR

SEQ ID NO: 6619 - protein, 39 aa, synthetic construct
  REGION 1..39: note = ATaRI peptide
GAEMETQRGKFYSLNMLQNHFDTRNYINISKKYLVIKLF

SEQ ID NO: 6620 - protein, 32 aa, synthetic construct
  REGION 1..32: note = ATaRI peptide
SSSKASLSRYHEQIFNKCFALCLNKYNLYRTD

SEQ ID NO: 6621 - protein, 45 aa, synthetic construct
  REGION 1..45: note = ATaRI peptide
ACNLSGTKGNRIYFVNSVIYLSFKFLCLYPYSVSPSVTLLCLRKS

SEQ ID NO: 6622 - protein, 9 aa, synthetic construct
  REGION 1..9: note = ATaRI peptide
ELAKNVIYR

SEQ ID NO: 6623 - protein, 12 aa, synthetic construct
  REGION 1..12: note = ATaRI peptide
AVELMKDQVIVS

SEQ ID NO: 6624 - protein, 16 aa, synthetic construct
  REGION 1..16: note = ATaRI peptide
AVALALNQVKPCGVHK

SEQ ID NO: 6625 - protein, 13 aa, synthetic construct
  REGION 1..13: note = ATaRI peptide
DIDIILLKVRKLF

SEQ ID NO: 6626 - protein, 27 aa, synthetic construct
  REGION 1..27: note = ATaRI peptide
LVLGAIAEGKPKSSLNYVSWLLTTIRY

SEQ ID NO: 6627 - protein, 21 aa, synthetic construct
  REGION 1..21: note = ATaRI peptide
KRVQEAACRWDRFITQCSLWQ

SEQ ID NO: 6628 - protein, 14 aa, synthetic construct
  REGION 1..14: note = ATaRI peptide
DLRDMFCKVTNKSL

SEQ ID NO: 6629 - protein, 15 aa, synthetic construct
  REGION 1..15: note = ATaRI peptide
EIHLQIGQVSFFTLC

SEQ ID NO: 6630 - protein, 15 aa, synthetic construct
  REGION 1..15: note = ATaRI peptide
LPNAQLVFRFVYFLF

SEQ ID NO: 6631 - protein, 9 aa, synthetic construct
  REGION 1..9: note = ATaRI peptide
MQSLPPAIW

SEQ ID NO: 6632 - protein, 11 aa, synthetic construct
  REGION 1..11: note = ATaRI peptide
SGGLLVSAGTS

SEQ ID NO: 6633 - protein, 47 aa, synthetic construct
  REGION 1..47: note = ATaRI peptide
LSSNLQSKVFLLLLIWYIASVENMLSAFTHLYLKDILYFIHTYELFF

SEQ ID NO: 6634 - protein, 12 aa, synthetic construct
  REGION 1..12: note = ATaRI peptide
DAAPACTKVIAQ

SEQ ID NO: 6635 - protein, 10 aa, synthetic construct
  REGION 1..10: note = ATaRI peptide
NKPQTILGSK

SEQ ID NO: 6636 - protein, 58 aa, synthetic construct
  REGION 1..58: note = ATaRI peptide
STESFIMEGEEKTHFHLFVFLLAFAKMTLSEGNKIEAFFFSFSKKSVSGCLFGIGSTF

SEQ ID NO: 6637 - protein, 47 aa, synthetic construct
  REGION 1..47: note = ATaRI peptide
IKRQDVIFGKRFKYALWVEAVRFREKNMEFATVQSWVKSQFYHFLFT

SEQ ID NO: 6638 - protein, 33 aa, synthetic construct
  REGION 1..33: note = ATaRI peptide
KKFQNFIKASILKLYYKVINQHGEIVYACFLMI

SEQ ID NO: 6639 - protein, 14 aa, synthetic construct
  REGION 1..14: note = ATaRI peptide
IMNVQSLKRLVKLI

SEQ ID NO: 6640 - protein, 17 aa, synthetic construct
  REGION 1..17: note = ATaRI peptide
FALSSNSQVSIIYKIGM

SEQ ID NO: 6641 - protein, 10 aa, synthetic construct
  REGION 1..10: note = ATaRI peptide
KYRAVSKEVS

SEQ ID NO: 6642 - protein, 23 aa, synthetic construct
  REGION 1..23: note = ATaRI peptide
IKDLPIRKVRFLHKVYLYMYSEF

SEQ ID NO: 6643 - protein, 19 aa, synthetic construct
  REGION 1..19: note = ATaRI peptide
QDINEMNEVCGSARYCHRT

SEQ ID NO: 6644 - protein, 21 aa, synthetic construct
  REGION 1..21: note = ATaRI peptide
HDIDILNQVSQANQSLEGLFS

SEQ ID NO: 6645 - protein, 10 aa, synthetic construct
  REGION 1..10: note = ATaRI peptide
HAGFPKLAGK

SEQ ID NO: 6646 - protein, 10 aa, synthetic construct
  REGION 1..10: note = ATaRI peptide
HFWMGCFKGI

SEQ ID NO: 6647 - protein, 9 aa, synthetic construct
  REGION 1..9: note = ATaRI peptide
LETQTGEAR

SEQ ID NO: 6648 - protein, 12 aa, synthetic construct
  REGION 1..12: note = ATaRI peptide
PAYTQIAKVSSC

SEQ ID NO: 6649 - protein, 9 aa, synthetic construct
  REGION 1..9: note = ATaRI peptide
TGHADDCVG

SEQ ID NO: 6650 - protein, 16 aa, synthetic construct
  REGION 1..16: note = ATaRI peptide
EIRAIPKKVFFSVFFR

SEQ ID NO: 6651 - protein, 15 aa, synthetic construct
  REGION 1..15: note = ATaRI peptide
QPRPYSCARYYYLFT

SEQ ID NO: 6652 - protein, 20 aa, synthetic construct
  REGION 1..20: note = ATaRI peptide
AEGLQRRRGTSTYFHGPSVV

SEQ ID NO: 6653 - protein, 19 aa, synthetic construct
  REGION 1..19: note = ATaRI peptide
QNALPFSHRYRFNSAIMIK

SEQ ID NO: 6654 - protein, 20 aa, synthetic construct
  REGION 1..20: note = ATaRI peptide
AQTNEALKSKSVQLLVIYFG

SEQ ID NO: 6655 - protein, 50 aa, synthetic construct
  REGION 1..50: note = ATaRI peptide
DLGMSGNSGELWGILFSPQSWLWYSGILQRAEERIRIVSFFFVEKGPFCS

SEQ ID NO: 6656 - protein, 18 aa, synthetic construct
  REGION 1..18: note = ATaRI peptide
TKSTLIGEDILFGREFFS

SEQ ID NO: 6657 - protein, 18 aa, synthetic construct
  REGION 1..18: note = ATaRI peptide
AKDTVDIKGKYFPCMSSS

SEQ ID NO: 6658 - protein, 33 aa, synthetic construct
  REGION 1..33: note = ATaRI peptide
NLEILQNQVRQIQGLVDYKSFWEKLLSKAAVCF

SEQ ID NO: 6659 - protein, 9 aa, synthetic construct
  REGION 1..9: note = ATaRI peptide
PTDWVKVGR

SEQ ID NO: 6660 - protein, 9 aa, synthetic construct
  REGION 1..9: note = ATaRI peptide
SAEWLDFLE

SEQ ID NO: 6661 - protein, 9 aa, synthetic construct
  REGION 1..9: note = ATaRI peptide
VAKQGDYCR

SEQ ID NO: 6662 - protein, 9 aa, synthetic construct
  REGION 1..9: note = ATaRI peptide
VTSYVDGSR

SEQ ID NO: 6663 - protein, 11 aa, synthetic construct
  REGION 1..11: note = ATaRI peptide
LEGLINTKRSE

SEQ ID NO: 6664 - protein, 39 aa, synthetic construct
  REGION 1..39: note = ATaRI peptide
DCPESQNSGEISGPLLRRGEISIPLRFILHLLLITQLGY

SEQ ID NO: 6665 - protein, 9 aa, synthetic construct
  REGION 1..9: note = ATaRI peptide
WSFSMDWDR

SEQ ID NO: 6666 - protein, 13 aa, synthetic construct
  REGION 1..13: note = ATaRI peptide
RETMYRTQVNFIG

SEQ ID NO: 6667 - protein, 19 aa, synthetic construct
  REGION 1..19: note = ATaRI peptide
GSHTYENQVQLSKLKIIYF

SEQ ID NO: 6668 - protein, 16 aa, synthetic construct
  REGION 1..16: note = ATaRI peptide
KQPVYNVEVRGLEQHW

SEQ ID NO: 6669 - protein, 23 aa, synthetic construct
  REGION 1..23: note = ATaRI peptide
ALLENVLQVRAALRIYNLFFKEC

SEQ ID NO: 6670 - protein, 9 aa, synthetic construct
  REGION 1..9: note = ATaRI peptide
WSLVEVLIR

SEQ ID NO: 6671 - protein, 24 aa, synthetic construct
  REGION 1..24: note = ATaRI peptide
GKLLLQHGGECVYAKWVLINYPVF

SEQ ID NO: 6672 - protein, 9 aa, synthetic construct
  REGION 1..9: note = ATaRI peptide
YTSGHHSIR

SEQ ID NO: 6673 - protein, 18 aa, synthetic construct
  REGION 1..18: note = ATaRI peptide
TSLYWLEKVSNYIVCAQK

SEQ ID NO: 6674 - protein, 10 aa, synthetic construct
  REGION 1..10: note = ATaRI peptide
VDIYPTMLGK

SEQ ID NO: 6675 - protein, 97 aa, synthetic construct
  REGION 1..97: note = ATaRI peptide
NKKKHKKQVMLFIVLGHLCLLTVTSPAQHVLITAIHSLLLTLRSHHGLSVGLAAHQPHSGTKSNFHCFLCPQFCHHPIVLHCQPKPVMNISLIKTPC

SEQ ID NO: 6676 - protein, 27 aa, synthetic construct
  REGION 1..27: note = ATaRI peptide
GKPKEHTEVNDYHQDLIIRQPLLVGYN

SEQ ID NO: 6677 - protein, 13 aa, synthetic construct
  REGION 1..13: note = ATaRI peptide
SEKSTEPKVNEAD

SEQ ID NO: 6678 - protein, 9 aa, synthetic construct
  REGION 1..9: note = ATaRI peptide
KPDKPSGKV

SEQ ID NO: 6679 - protein, 10 aa, synthetic construct
  REGION 1..10: note = ATaRI peptide
PKYRELLAVS

SEQ ID NO: 6680 - protein, 21 aa, synthetic construct
  REGION 1..21: note = ATaRI peptide
KPVMDKVKVMATEMLLENKYH

SEQ ID NO: 6681 - protein, 9 aa, synthetic construct
  REGION 1..9: note = ATaRI peptide
KNWNKLVQK

SEQ ID NO: 6682 - protein, 11 aa, synthetic construct
  REGION 1..11: note = ATaRI peptide
NEVETQFKVKA

SEQ ID NO: 6683 - protein, 28 aa, synthetic construct
  REGION 1..28: note = ATaRI peptide
TALSNMPKVLFCSLNVKIFEWVSFFKNT

SEQ ID NO: 6684 - protein, 23 aa, synthetic construct
  REGION 1..23: note = ATaRI peptide
IQYPLKKLGKNQIVCLIFVIIRT

SEQ ID NO: 6685 - protein, 53 aa, synthetic construct
  REGION 1..53: note = ATaRI peptide
KIFKELSSVSTGFLWPTMNARRKNSQITFSCIFCASGVMKMFLGRYAKLDFGY

SEQ ID NO: 6686 - protein, 9 aa, synthetic construct
  REGION 1..9: note = ATaRI peptide
INNIFELAG

SEQ ID NO: 6687 - protein, 54 aa, synthetic construct
  REGION 1..54: note = ATaRI peptide
SEDVRKLYWYEITEEYDIQKPKEYKHCALGQELIFEGISFPHFCYRPGLSWTVW

SEQ ID NO: 6688 - protein, 52 aa, synthetic construct
  REGION 1..52: note = ATaRI peptide
FSLGLLHAGRTGAREGSQPRGLGLCSQIAPGLEGARRGGRAAWRNGKGLPSP

SEQ ID NO: 6689 - protein, 22 aa, synthetic construct
  REGION 1..22: note = ATaRI peptide
VTLNRIPGTYNSIFHAKEMCRI

SEQ ID NO: 6690 - protein, 9 aa, synthetic construct
  REGION 1..9: note = ATaRI peptide
ILIKVVRGW

SEQ ID NO: 6691 - protein, 23 aa, synthetic construct
  REGION 1..23: note = ATaRI peptide
VEFPTDPKVKIYMYFCMYVYVII

SEQ ID NO: 6692 - protein, 9 aa, synthetic construct
  REGION 1..9: note = ATaRI peptide
GSMKVLRGM

SEQ ID NO: 6693 - protein, 17 aa, synthetic construct
  REGION 1..17: note = ATaRI peptide
GSLRPFVQVFSSSPCSA

SEQ ID NO: 6694 - protein, 55 aa, synthetic construct
  REGION 1..55: note = ATaRI peptide
QEGCIKCRVSFRIPRGPVMALLGGDSSFHMLLIFSSSRCNFTIPGVLSEMNLFFS

SEQ ID NO: 6695 - protein, 9 aa, synthetic construct
  REGION 1..9: note = ATaRI peptide
AVSAFTCYA

SEQ ID NO: 6696 - protein, 16 aa, synthetic construct
  REGION 1..16: note = ATaRI peptide
FTQAVNMAGEDSSGTF

SEQ ID NO: 6697 - protein, 9 aa, synthetic construct
  REGION 1..9: note = ATaRI peptide
VPRLVLGTW

SEQ ID NO: 6698 - protein, 11 aa, synthetic construct
  REGION 1..11: note = ATaRI peptide
KLWKKSRTVRY

SEQ ID NO: 6699 - protein, 38 aa, synthetic construct
  REGION 1..38: note = ATaRI peptide
CEFKAHENRYFYQSLVYMSSLNKRYICSSFISQVICFY

SEQ ID NO: 6700 - protein, 31 aa, synthetic construct
  REGION 1..31: note = ATaRI peptide
MWKLKQDKVSASTQSKCTLIQVLLISEVEFF

SEQ ID NO: 6701 - protein, 79 aa, synthetic construct
  REGION 1..79: note = ATaRI peptide
GLYVYGDVGKCVKISFGWAKQKVSQLSLRDDFYFYPSICYQQGNRMRQGKVGREEKGERAVISAFTLLLTGYSCSLGQN

SEQ ID NO: 6702 - protein, 32 aa, synthetic construct
  REGION 1..32: note = ATaRI peptide
QELIKQKKGKKCSSSQKPGVTGVYSSKIINLV

SEQ ID NO: 6703 - protein, 14 aa, synthetic construct
  REGION 1..14: note = ATaRI peptide
DLVIIDDRVSILQT

SEQ ID NO: 6704 - protein, 40 aa, synthetic construct
  REGION 1..40: note = ATaRI peptide
AVSAFGVVGKKSAPLLTISCFLFLSSLHRLLKGVYKAIRL

SEQ ID NO: 6705 - protein, 10 aa, synthetic construct
  REGION 1..10: note = ATaRI peptide
LKRGANCEVR

SEQ ID NO: 6706 - protein, 9 aa, synthetic construct
  REGION 1..9: note = ATaRI peptide
WDMAKYTKR

SEQ ID NO: 6707 - protein, 13 aa, synthetic construct
  REGION 1..13: note = ATaRI peptide
MRLLPTRRRYFSS

SEQ ID NO: 6708 - protein, 22 aa, synthetic construct
  REGION 1..22: note = ATaRI peptide
QRRTFATYGKVIRLKQFQFWLY

SEQ ID NO: 6709 - protein, 12 aa, synthetic construct
  REGION 1..12: note = ATaRI peptide
CSMDCKIKVSFQ

SEQ ID NO: 6710 - protein, 26 aa, synthetic construct
  REGION 1..26: note = ATaRI peptide
RRCLRTFIGNASFLSNINLGRIFKVR

SEQ ID NO: 6711 - protein, 30 aa, synthetic construct
  REGION 1..30: note = ATaRI peptide
LKLWDTETGKSSLMLIHIHLTSYLYLKWCE

SEQ ID NO: 6712 - protein, 17 aa, synthetic construct
  REGION 1..17: note = ATaRI peptide
PAVTLSPNGELVCRLYF

SEQ ID NO: 6713 - protein, 44 aa, synthetic construct
  REGION 1..44: note = ATaRI peptide
KRPNNLVIGKYNLLFNVFTDRVNLLAAANSYGSAATWFLPLQRK

SEQ ID NO: 6714 - protein, 35 aa, synthetic construct
  REGION 1..35: note = ATaRI peptide
RRLKSLLIGKYFSIYYLQGSSGRQSQTLTGGTLLL

SEQ ID NO: 6715 - protein, 30 aa, synthetic construct
  REGION 1..30: note = ATaRI peptide
LCASFLGLVRAGAATLPGRGVRVLPSPLAN

SEQ ID NO: 6716 - protein, 10 aa, synthetic construct
  REGION 1..10: note = ATaRI peptide
VMNYFLLLGK

SEQ ID NO: 6717 - protein, 9 aa, synthetic construct
  REGION 1..9: note = ATaRI peptide
VSIGILDTG

SEQ ID NO: 6718 - protein, 9 aa, synthetic construct
  REGION 1..9: note = ATaRI peptide
RDGAEEPHG

SEQ ID NO: 6719 - protein, 18 aa, synthetic construct
  REGION 1..18: note = ATaRI peptide
SVTGAMITSKLIFFCLRM

SEQ ID NO: 6720 - protein, 23 aa, synthetic construct
  REGION 1..23: note = ATaRI peptide
RVVDYLTKVSGDSFFKTMICSQS

SEQ ID NO: 6721 - protein, 23 aa, synthetic construct
  REGION 1..23: note = ATaRI peptide
IPSIEAIAGKGENTYKASPVTRQ

SEQ ID NO: 6722 - protein, 11 aa, synthetic construct
  REGION 1..11: note = ATaRI peptide
ILKLLALQVRK

SEQ ID NO: 6723 - protein, 26 aa, synthetic construct
  REGION 1..26: note = ATaRI peptide
SDIQFLEDGKIIVEFHMWDRHSSSNL

SEQ ID NO: 6724 - protein, 25 aa, synthetic construct
  REGION 1..25: note = ATaRI peptide
RKQKREEQVGVFSYLILFFKILIIC

SEQ ID NO: 6725 - protein, 33 aa, synthetic construct
  REGION 1..33: note = ATaRI peptide
KFRKLLSKGKNYFQYAYLILHDFLVEVYFIVFF

SEQ ID NO: 6726 - protein, 19 aa, synthetic construct
  REGION 1..19: note = ATaRI peptide
RNENCTLQVSLKFSFLIFL

SEQ ID NO: 6727 - protein, 11 aa, synthetic construct
  REGION 1..11: note = ATaRI peptide
EHEDVQEQVRL

SEQ ID NO: 6728 - protein, 9 aa, synthetic construct
  REGION 1..9: note = ATaRI peptide
CRRLVELLM

SEQ ID NO: 6729 - protein, 18 aa, synthetic construct
  REGION 1..18: note = ATaRI peptide
TGDDIQTQVSSNLSIINC

SEQ ID NO: 6730 - protein, 20 aa, synthetic construct
  REGION 1..20: note = ATaRI peptide
SGGTPEQIRYDINFLIVFYM

SEQ ID NO: 6731 - protein, 18 aa, synthetic construct
  REGION 1..18: note = ATaRI peptide
CALIEEAYGKQSVKNLQL

SEQ ID NO: 6732 - protein, 12 aa, synthetic construct
  REGION 1..12: note = ATaRI peptide
KWKSSLSKVLEI

SEQ ID NO: 6733 - protein, 37 aa, synthetic construct
  REGION 1..37: note = ATaRI peptide
CNFSFKTKGMRCTLLQGPFNMYLGGKAKTQLCVFFDR

SEQ ID NO: 6734 - protein, 21 aa, synthetic construct
  REGION 1..21: note = ATaRI peptide
LTSSSPGARYGQATAASEPPE

SEQ ID NO: 6735 - protein, 27 aa, synthetic construct
  REGION 1..27: note = ATaRI peptide
QQQQVIRKVRSSFPQDHNLHLFNEYCL

SEQ ID NO: 6736 - protein, 11 aa, synthetic construct
  REGION 1..11: note = ATaRI peptide
PTDNHHHKVIF

SEQ ID NO: 6737 - protein, 49 aa, synthetic construct
  REGION 1..49: note = ATaRI peptide
TDYINNTKVSFNSCCSGPIAIKIYKNVLISREQCHSQPQKAFYILTQYV

SEQ ID NO: 6738 - protein, 9 aa, synthetic construct
  REGION 1..9: note = ATaRI peptide
EASFMIWTG

SEQ ID NO: 6739 - protein, 28 aa, synthetic construct
  REGION 1..28: note = ATaRI peptide
NSQQNKEKVDPIDQNHLGINGRQNLYVY

SEQ ID NO: 6740 - protein, 22 aa, synthetic construct
  REGION 1..22: note = ATaRI peptide
IMVLSDKKGNVMLCLHLPSLRV

SEQ ID NO: 6741 - protein, 29 aa, synthetic construct
  REGION 1..29: note = ATaRI peptide
DPRDYKLLVSWQISELTPYLCISLQFSLI

SEQ ID NO: 6742 - protein, 9 aa, synthetic construct
  REGION 1..9: note = ATaRI peptide
SEEHLRQTR

SEQ ID NO: 6743 - protein, 24 aa, synthetic construct
  REGION 1..24: note = ATaRI peptide
CRYFTDGKVYSNVICFLSLKSMKN

SEQ ID NO: 6744 - protein, 22 aa, synthetic construct
  REGION 1..22: note = ATaRI peptide
LENMHIEQVGSPWPPRVGVPRL

SEQ ID NO: 6745 - protein, 11 aa, synthetic construct
  REGION 1..11: note = ATaRI peptide
YTFSPHFKVPR

SEQ ID NO: 6746 - protein, 31 aa, synthetic construct
  REGION 1..31: note = ATaRI peptide
LRKDQVELGKMMAVFFMFISFSVGISDGSED

SEQ ID NO: 6747 - protein, 21 aa, synthetic construct
  REGION 1..21: note = ATaRI peptide
VNSYWFITVSILVMSAAYKNI

SEQ ID NO: 6748 - protein, 10 aa, synthetic construct
  REGION 1..10: note = ATaRI peptide
SSQETYGKVS

SEQ ID NO: 6749 - protein, 9 aa, synthetic construct
  REGION 1..9: note = ATaRI peptide
LMKRTVCAK

SEQ ID NO: 6750 - protein, 27 aa, synthetic construct
  REGION 1..27: note = ATaRI peptide
TLPGSDLKVNPLYYIQLCVCASVRMLT

SEQ ID NO: 6751 - protein, 58 aa, synthetic construct
  REGION 1..58: note = ATaRI peptide
TSPPGCPTGTSNSTCLKCNSFSISFSPPHKPALSSLTHISVDNSTIHPVDKQETQESS

SEQ ID NO: 6752 - protein, 9 aa, synthetic construct
  REGION 1..9: note = ATaRI peptide
NCARHIKDK

SEQ ID NO: 6753 - protein, 21 aa, synthetic construct
  REGION 1..21: note = ATaRI peptide
YCVLTVAEVSFASSFIFKIKW

SEQ ID NO: 6754 - protein, 9 aa, synthetic construct
  REGION 1..9: note = ATaRI peptide
NWDESYDYW

SEQ ID NO: 6755 - protein, 24 aa, synthetic construct
  REGION 1..24: note = ATaRI peptide
RRTLITPPGVCFFNVANTIRRLQE

SEQ ID NO: 6756 - protein, 10 aa, synthetic construct
  REGION 1..10: note = ATaRI peptide
APARAFKVVR

SEQ ID NO: 6757 - protein, 26 aa, synthetic construct
  REGION 1..26: note = ATaRI peptide
DTDDHRVKVSVLCGGLALSFVIRCFR

SEQ ID NO: 6758 - protein, 28 aa, synthetic construct
  REGION 1..28: note = ATaRI peptide
RARHLGPHRYVVAVTHLVRYRCSIYMYI

SEQ ID NO: 6759 - protein, 125 aa, synthetic construct
  REGION 1..125: note = ATaRI peptide
SRGEDARDGECRGPSGRRRRAREAGRWLGLSQFGGTAGVCRLENCGDIRTPPRHDSRPPGTLQSATHSPTRARNPAHPIDVYGPQNEGFETVKRASLGFSFGKPRLRGFVGSKSADSCFFLPWAS

SEQ ID NO: 6760 - protein, 62 aa, synthetic construct
  REGION 1..62: note = ATaRI peptide
EKFKHTSAGKMICSFISHLVFVAFNSIILTEFNCNRLFEPKEKKYQALEWLLSLKFFQYDQE

SEQ ID NO: 6761 - protein, 9 aa, synthetic construct
  REGION 1..9: note = ATaRI peptide
LLNEDEVNM

SEQ ID NO: 6762 - protein, 47 aa, synthetic construct
  REGION 1..47: note = ATaRI peptide
VLKEIYDKGKEDWSVIPGSKSHAWNLHAYCLEFHFIFCITRYQDLNH

SEQ ID NO: 6763 - protein, 16 aa, synthetic construct
  REGION 1..16: note = ATaRI peptide
CFCPHLQNVSNNFMHP

SEQ ID NO: 6764 - protein, 19 aa, synthetic construct
  REGION 1..19: note = ATaRI peptide
VPMYEEFRSKYEFRVLILK

SEQ ID NO: 6765 - protein, 15 aa, synthetic construct
  REGION 1..15: note = ATaRI peptide
PSDIMDGPGNAPAGL

SEQ ID NO: 6766 - protein, 34 aa, synthetic construct
  REGION 1..34: note = ATaRI peptide
TRIANHLTGECRRLLGQAVPPSLQGIFFFSCSLN

SEQ ID NO: 6767 - protein, 15 aa, synthetic construct
  REGION 1..15: note = ATaRI peptide
SLQKLGFQVTFSNSI

SEQ ID NO: 6768 - protein, 13 aa, synthetic construct
  REGION 1..13: note = ATaRI peptide
ISGRDVSSGRALV

SEQ ID NO: 6769 - protein, 21 aa, synthetic construct
  REGION 1..21: note = ATaRI peptide
TKNLLEIHGERPPASHSGNQL

SEQ ID NO: 6770 - protein, 9 aa, synthetic construct
  REGION 1..9: note = ATaRI peptide
ICPALSGKG

SEQ ID NO: 6771 - protein, 11 aa, synthetic construct
  REGION 1..11: note = ATaRI peptide
EELFIEQKVRG

SEQ ID NO: 6772 - protein, 9 aa, synthetic construct
  REGION 1..9: note = ATaRI peptide
KLTTASQTK

SEQ ID NO: 6773 - protein, 25 aa, synthetic construct
  REGION 1..25: note = ATaRI peptide
VYKEHAQEVGGKSFWADYFSFFDFG

SEQ ID NO: 6774 - protein, 9 aa, synthetic construct
  REGION 1..9: note = ATaRI peptide
CDWCKYNEV

SEQ ID NO: 6775 - protein, 13 aa, synthetic construct
  REGION 1..13: note = ATaRI peptide
TGLCYDTRVGFSP

SEQ ID NO: 6776 - protein, 19 aa, synthetic construct
  REGION 1..19: note = ATaRI peptide
VTLKDSGPGEKTALIHIYN

SEQ ID NO: 6777 - protein, 10 aa, synthetic construct
  REGION 1..10: note = ATaRI peptide
FIEYRENKRE

SEQ ID NO: 6778 - protein, 50 aa, synthetic construct
  REGION 1..50: note = ATaRI peptide
AKRTEEQLVRHLEELSLPPVCSMLFAGAFSTDSDKQAFLSARFCLLMIKD

SEQ ID NO: 6779 - protein, 9 aa, synthetic construct
  REGION 1..9: note = ATaRI peptide
VKIPPHVLR

SEQ ID NO: 6780 - protein, 24 aa, synthetic construct
  REGION 1..24: note = ATaRI peptide
SAVLKIAEVSTACVCASCSQLLYL

SEQ ID NO: 6781 - protein, 11 aa, synthetic construct
  REGION 1..11: note = ATaRI peptide
LRQRQENTVSL

SEQ ID NO: 6782 - protein, 9 aa, synthetic construct
  REGION 1..9: note = ATaRI peptide
CEKLQAAIK

SEQ ID NO: 6783 - protein, 56 aa, synthetic construct
  REGION 1..56: note = ATaRI peptide
EAIKIMKEVRRHWRSPPGLQGGLTSVSHTRSAQKRLANHLPELHYCLMVSSSECCL

SEQ ID NO: 6784 - protein, 10 aa, synthetic construct
  REGION 1..10: note = ATaRI peptide
NFASTFCSGL

SEQ ID NO: 6785 - protein, 67 aa, synthetic construct
  REGION 1..67: note = ATaRI peptide
EPSDAITQGNNWRARTHLVPWVQYAHTCTGLHTPANTRACSVCDARYVYTTDHEIPLSHRLGSLPCR

SEQ ID NO: 6786 - protein, 45 aa, synthetic construct
  REGION 1..45: note = ATaRI peptide
DYLRRCSQVGEWSSWAPGLETCLGTCCQNMRGGSFAEARERHFAV

SEQ ID NO: 6787 - protein, 30 aa, synthetic construct
  REGION 1..30: note = ATaRI peptide
RIRAMAQQVRAGAFDLRSSRNSKCMLGDLP

SEQ ID NO: 6788 - protein, 14 aa, synthetic construct
  REGION 1..14: note = ATaRI peptide
ICIVAKSPGDLYAR

SEQ ID NO: 6789 - protein, 10 aa, synthetic construct
  REGION 1..10: note = ATaRI peptide
KLMDQLEAVS

SEQ ID NO: 6790 - protein, 19 aa, synthetic construct
  REGION 1..19: note = ATaRI peptide
PVGIEEDNGMYLFILSKRT

SEQ ID NO: 6791 - protein, 22 aa, synthetic construct
  REGION 1..22: note = ATaRI peptide
NRIDKQRNGKKSLPFIFLVCLT

SEQ ID NO: 6792 - protein, 10 aa, synthetic construct
  REGION 1..10: note = ATaRI peptide
HTVNVRQLGK

SEQ ID NO: 6793 - protein, 14 aa, synthetic construct
  REGION 1..14: note = ATaRI peptide
KIKHTRTQVRKRSQ

SEQ ID NO: 6794 - protein, 17 aa, synthetic construct
  REGION 1..17: note = ATaRI peptide
FTHFGVLMVRGEFLSSF

SEQ ID NO: 6795 - protein, 9 aa, synthetic construct
  REGION 1..9: note = ATaRI peptide
YGKEKGDEL

SEQ ID NO: 6796 - protein, 30 aa, synthetic construct
  REGION 1..30: note = ATaRI peptide
YFKRNSHTGESKDVLKFSSHHIFIAKIGIS

SEQ ID NO: 6797 - protein, 9 aa, synthetic construct
  REGION 1..9: note = ATaRI peptide
SFNKSGSLR

SEQ ID NO: 6798 - protein, 40 aa, synthetic construct
  REGION 1..40: note = ATaRI peptide
NYIWDTQKSKYCLREHKTRELLPATVYAETEGKFHCSLFF

SEQ ID NO: 6799 - protein, 9 aa, synthetic construct
  REGION 1..9: note = ATaRI peptide
SLTALLKNR

SEQ ID NO: 6800 - protein, 15 aa, synthetic construct
  REGION 1..15: note = ATaRI peptide
IWEDLKIISKPAYSV

SEQ ID NO: 6801 - protein, 12 aa, synthetic construct
  REGION 1..12: note = ATaRI peptide
LKRRLSRKVMKS

SEQ ID NO: 6802 - protein, 19 aa, synthetic construct
  REGION 1..19: note = ATaRI peptide
LNKAAPVSGIFNCFIFSYG

SEQ ID NO: 6803 - protein, 9 aa, synthetic construct
  REGION 1..9: note = ATaRI peptide
VESMDRQSR

SEQ ID NO: 6804 - protein, 12 aa, synthetic construct
  REGION 1..12: note = ATaRI peptide
AILEDQLQVRVL

SEQ ID NO: 6805 - protein, 19 aa, synthetic construct
  REGION 1..19: note = ATaRI peptide
SEMKKKLKVKNINHIYPSA

SEQ ID NO: 6806 - protein, 22 aa, synthetic construct
  REGION 1..22: note = ATaRI peptide
DRQQHLENGKPNNFKISCLSLP

SEQ ID NO: 6807 - protein, 29 aa, synthetic construct
  REGION 1..29: note = ATaRI peptide
DAVNEALEVGTRDLHGISLCCDEATRVLQ

SEQ ID NO: 6808 - protein, 33 aa, synthetic construct
  REGION 1..33: note = ATaRI peptide
SKQEEIVKVANTDISNAFGSGMFCCHVFSSGML

SEQ ID NO: 6809 - protein, 26 aa, synthetic construct
  REGION 1..26: note = ATaRI peptide
SQHIKSAKVSNYAFRVNHFSYGYVSK

SEQ ID NO: 6810 - protein, 13 aa, synthetic construct
  REGION 1..13: note = ATaRI peptide
EKARIHQQVSAFC

SEQ ID NO: 6811 - protein, 33 aa, synthetic construct
  REGION 1..33: note = ATaRI peptide
TKQISDNQVRLIRYFLAVLFCWIYFFSIVHCNS

SEQ ID NO: 6812 - protein, 32 aa, synthetic construct
  REGION 1..32: note = ATaRI peptide
SGPQFHQAGRCPQHTAPLLSLLCALPLVCVSC

SEQ ID NO: 6813 - protein, 101 aa, synthetic construct
  REGION 1..101: note = ATaRI peptide
RLQLWDIAGKRGREFPTPEPRRAAWLLSASFLFLFCLNSSAWVPLGEERGPIQGRDAMDAVGWTRWGPEDGMGSRSWSRSCTPELALLKGGEEARGPFPEV

SEQ ID NO: 6814 - protein, 13 aa, synthetic construct
  REGION 1..13: note = ATaRI peptide
QLQFLINEVSELF

SEQ ID NO: 6815 - protein, 9 aa, synthetic construct
  REGION 1..9: note = ATaRI peptide
VEFKTTRSG

SEQ ID NO: 6816 - protein, 9 aa, synthetic construct
  REGION 1..9: note = ATaRI peptide
VLIDLAQNG

SEQ ID NO: 6817 - protein, 9 aa, synthetic construct
  REGION 1..9: note = ATaRI peptide
LAVNSSYGL

SEQ ID NO: 6818 - protein, 19 aa, synthetic construct
  REGION 1..19: note = ATaRI peptide
RKSRQPSGGKKKRKENSEL

SEQ ID NO: 6819 - protein, 10 aa, synthetic construct
  REGION 1..10: note = ATaRI peptide
PTDLKPDLGK

SEQ ID NO: 6820 - protein, 15 aa, synthetic construct
  REGION 1..15: note = ATaRI peptide
QPVIVSPSGMYCCCT

SEQ ID NO: 6821 - protein, 15 aa, synthetic construct
  REGION 1..15: note = ATaRI peptide
SLSGQSSMSKSSLSL

SEQ ID NO: 6822 - protein, 56 aa, synthetic construct
  REGION 1..56: note = ATaRI peptide
DTDSLKLKVSLSLASEQLTGLFHFSRRLSFLLTVECWATMVQTGQYLGYLDHWSPL

SEQ ID NO: 6823 - protein, 98 aa, synthetic construct
  REGION 1..98: note = ATaRI peptide
AAAVRSPTGRAGRAWLAALRLRLSGRPGLSTVTLPTSHRRAGAGVRAPEGGVGRSTPGNGGGVGGRGKRKGTHWGCVAVSEPRATPHRLSGGPSRRAT

SEQ ID NO: 6824 - protein, 53 aa, synthetic construct
  REGION 1..53: note = ATaRI peptide
LTACFARMVRVLFLTLAPTEEYYMIWLYVFLTSGFHVYLFVNSIRIAVGMSIT

SEQ ID NO: 6825 - protein, 19 aa, synthetic construct
  REGION 1..19: note = ATaRI peptide
KPVLAIIQVSREQGSVLLF

SEQ ID NO: 6826 - protein, 9 aa, synthetic construct
  REGION 1..9: note = ATaRI peptide
LQPLSPVPR

SEQ ID NO: 6827 - protein, 16 aa, synthetic construct
  REGION 1..16: note = ATaRI peptide
EIQLARLKVSFQLAIL

SEQ ID NO: 6828 - protein, 30 aa, synthetic construct
  REGION 1..30: note = ATaRI peptide
KMHGGGPSVSAHTAFLIPKKFHYVKTELSI

SEQ ID NO: 6829 - protein, 27 aa, synthetic construct
  REGION 1..27: note = ATaRI peptide
EFFEKHGEVRIVLTFNFLLISQQKHNK

SEQ ID NO: 6830 - protein, 24 aa, synthetic construct
  REGION 1..24: note = ATaRI peptide
DEFFKLLQVNVIINLLSMFYLNRK

SEQ ID NO: 6831 - protein, 20 aa, synthetic construct
  REGION 1..20: note = ATaRI peptide
AILPQPTEVRHKPLSLESRA

SEQ ID NO: 6832 - protein, 21 aa, synthetic construct
  REGION 1..21: note = ATaRI peptide
EQGVSFNKVEIKISDQVYMNY

SEQ ID NO: 6833 - protein, 9 aa, synthetic construct
  REGION 1..9: note = ATaRI peptide
KKEIPASQL

SEQ ID NO: 6834 - protein, 14 aa, synthetic construct
  REGION 1..14: note = ATaRI peptide
RTHSRSRSRFYNDI

SEQ ID NO: 6835 - protein, 23 aa, synthetic construct
  REGION 1..23: note = ATaRI peptide
KIGSKVIKVRFGGLELGVGGQYF

SEQ ID NO: 6836 - protein, 26 aa, synthetic construct
  REGION 1..26: note = ATaRI peptide
PPPVAMLQVSVEVGFFFSCVVLHFCF

SEQ ID NO: 6837 - protein, 25 aa, synthetic construct
  REGION 1..25: note = ATaRI peptide
DFHKCIYKVGASAEQPLPAAGVREE

SEQ ID NO: 6838 - protein, 9 aa, synthetic construct
  REGION 1..9: note = ATaRI peptide
LHTGADCIW

SEQ ID NO: 6839 - protein, 20 aa, synthetic construct
  REGION 1..20: note = ATaRI peptide
QMLESNVMVRPLSHRLQQEL

SEQ ID NO: 6840 - protein, 121 aa, synthetic construct
  REGION 1..121: note = ATaRI peptide
QHLCYLSMVSPPGPAGALACSAWPESSGVAPRRGRALSAQETCCAPISGAGCGTSAELLAAGGGCLTHSDQATQRLSLCSAHAWPSLGPAVRPSSLGSRWPPSPPYFVTPAPTHSALTHSF

SEQ ID NO: 6841 - protein, 30 aa, synthetic construct
  REGION 1..30: note = ATaRI peptide
KLMYRYDEVSPCPRGRAGRQRGAFPAPGWM

SEQ ID NO: 6842 - protein, 11 aa, synthetic construct
  REGION 1..11: note = ATaRI peptide
IASLVAEQVLT

SEQ ID NO: 6843 - protein, 9 aa, synthetic construct
  REGION 1..9: note = ATaRI peptide
EANAPAFDR

SEQ ID NO: 6844 - protein, 62 aa, synthetic construct
  REGION 1..62: note = ATaRI peptide
TQKLCFPMVSGAVGTASTSLLSSVPNVTVDRSQALGTQPQGGPLPGGLSAGGGGEGYVPPWN

SEQ ID NO: 6845 - protein, 38 aa, synthetic construct
  REGION 1..38: note = ATaRI peptide
KKQHPTYKGSLTLLFSGASAMESAQDRLSFFSWRLGTV

SEQ ID NO: 6846 - protein, 15 aa, synthetic construct
  REGION 1..15: note = ATaRI peptide
LERSAYRMVSSFDTA

SEQ ID NO: 6847 - protein, 18 aa, synthetic construct
  REGION 1..18: note = ATaRI peptide
SDDYAPPQGTHWPYFPCH

SEQ ID NO: 6848 - protein, 9 aa, synthetic construct
  REGION 1..9: note = ATaRI peptide
ASKSPKLPR

SEQ ID NO: 6849 - protein, 57 aa, synthetic construct
  REGION 1..57: note = ATaRI peptide
QIELEGRQVRPQTRWRCEPRRRGFQCFGLQGAFFKRPNGKCGKQRTPLRWSSWGYGF

SEQ ID NO: 6850 - protein, 16 aa, synthetic construct
  REGION 1..16: note = ATaRI peptide
VVELDQSKGMELDILE

SEQ ID NO: 6851 - protein, 25 aa, synthetic construct
  REGION 1..25: note = ATaRI peptide
TRTLTCAGVSVWGEPHSQSSGCVHV

SEQ ID NO: 6852 - protein, 20 aa, synthetic construct
  REGION 1..20: note = ATaRI peptide
RVDTGNFQVRIVNEACNFSS

SEQ ID NO: 6853 - protein, 120 aa, synthetic construct
  REGION 1..120: note = ATaRI peptide
ELSTHYQNYILFTGGPWLQDACLALQQLVAQICPSQEETGQLLAPCSPEASSLLRGVSVGPAAAVGRGSLSLLCTQEAWLSSCPRSGFGWQSPAPNPERLALWSVPTPRCFPPRGAGAVR

SEQ ID NO: 6854 - protein, 42 aa, synthetic construct
  REGION 1..42: note = ATaRI peptide
SPSKNALYGKPPWGLDCWPVSGHRGLCSSTTHFPGFPFMWAL

SEQ ID NO: 6855 - protein, 9 aa, synthetic construct
  REGION 1..9: note = ATaRI peptide
LLQSYQKLR

SEQ ID NO: 6856 - protein, 9 aa, synthetic construct
  REGION 1..9: note = ATaRI peptide
GTLNSFVKG

SEQ ID NO: 6857 - protein, 43 aa, synthetic construct
  REGION 1..43: note = ATaRI peptide
HNCHMGITGKADMAETVLALKRLKRPYTNLLLRCFRPYGQRLS

SEQ ID NO: 6858 - protein, 31 aa, synthetic construct
  REGION 1..31: note = ATaRI peptide
AFLCGKTLVSPHRHLMYFFKKKKVCPLVFWL

SEQ ID NO: 6859 - protein, 24 aa, synthetic construct
  REGION 1..24: note = ATaRI peptide
GRYHNQTLRYVNNLCAIFLFLCIS

SEQ ID NO: 6860 - protein, 58 aa, synthetic construct
  REGION 1..58: note = ATaRI peptide
LSALVRHAGTALLAMRVLVHMLMEHFPMSTFGNAVTIFFVSGLRHSPPPVFSCGCVNY

SEQ ID NO: 6861 - protein, 18 aa, synthetic construct
  REGION 1..18: note = ATaRI peptide
EDAAVCAVGELCLDGRSR

SEQ ID NO: 6862 - protein, 39 aa, synthetic construct
  REGION 1..39: note = ATaRI peptide
NITLVCKPGKNFKKDEIFSGFCQRSCILHISVPHQSLQS

SEQ ID NO: 6863 - protein, 12 aa, synthetic construct
  REGION 1..12: note = ATaRI peptide
SGIGKIFMVRAI

SEQ ID NO: 6864 - protein, 28 aa, synthetic construct
  REGION 1..28: note = ATaRI peptide
TFECAQISVCVQTSNEMLSPGDSISHFP

SEQ ID NO: 6865 - protein, 23 aa, synthetic construct
  REGION 1..23: note = ATaRI peptide
ACPVVRVEGRTGPVPTSHFKCIE

SEQ ID NO: 6866 - protein, 23 aa, synthetic construct
  REGION 1..23: note = ATaRI peptide
PQGFHKVAGTIVCRFPFVAKEWN

SEQ ID NO: 6867 - protein, 23 aa, synthetic construct
  REGION 1..23: note = ATaRI peptide
FTCSESQVVRDCSCTFCCCSFGN

SEQ ID NO: 6868 - protein, 13 aa, synthetic construct
  REGION 1..13: note = ATaRI peptide
HCKRGVSMVSVGL

SEQ ID NO: 6869 - protein, 39 aa, synthetic construct
  REGION 1..39: note = ATaRI peptide
SLSTSTFKVMRSPWALLVQVYQVPGAVRLLGVFWIMWYL

SEQ ID NO: 6870 - protein, 9 aa, synthetic construct
  REGION 1..9: note = ATaRI peptide
WSLVHNGVS

SEQ ID NO: 6871 - protein, 9 aa, synthetic construct
  REGION 1..9: note = ATaRI peptide
FSLGDIYFK

SEQ ID NO: 6872 - protein, 31 aa, synthetic construct
  REGION 1..31: note = ATaRI peptide
DSSASDEIRLELCFLSPSTSYLVVSFLMVRS

SEQ ID NO: 6873 - protein, 61 aa, synthetic construct
  REGION 1..61: note = ATaRI peptide
LKSKQYVKVSTSNVVIETFCLSFFILKQADFFLKVQIVNITGSEGCTTTPVVRLSCNSPVE

SEQ ID NO: 6874 - protein, 36 aa, synthetic construct
  REGION 1..36: note = ATaRI peptide
RTLISQSKGERKSVEVKKKKKKKTRLHIRGAVSGKT

SEQ ID NO: 6875 - protein, 49 aa, synthetic construct
  REGION 1..49: note = ATaRI peptide
GIVHRDIKGNPTPAWLLWARATGTQPVGGALKTLIPFPHMISLDGNTFH

SEQ ID NO: 6876 - protein, 14 aa, synthetic construct
  REGION 1..14: note = ATaRI peptide
LLDHSFVKVWQITG

SEQ ID NO: 6877 - protein, 9 aa, synthetic construct
  REGION 1..9: note = ATaRI peptide
ELSSATLNR

SEQ ID NO: 6878 - protein, 64 aa, synthetic construct
  REGION 1..64: note = ATaRI peptide
ITETHAFYRHVSRVLGHLSTTALRFLGDNQVSTVPWIVVSMSLVQNLRNSEHFVSVVAVESLLM

SEQ ID NO: 6879 - protein, 36 aa, synthetic construct
  REGION 1..36: note = ATaRI peptide
ESCAAQLQVGESAAHFCLQPHLSLLLTGSRSQVLAR

SEQ ID NO: 6880 - protein, 15 aa, synthetic construct
  REGION 1..15: note = ATaRI peptide
ENDAIPPKVGTLSIL

SEQ ID NO: 6881 - protein, 9 aa, synthetic construct
  REGION 1..9: note = ATaRI peptide
DRPFQGEDV

SEQ ID NO: 6882 - protein, 66 aa, synthetic construct
  REGION 1..66: note = ATaRI peptide
PDEPFIPTVSGCCHITTQCGTCLHGDIWMKKQKEILFNTLTYLFSSYKIIFVLLSKSSMKKQKLYS

SEQ ID NO: 6883 - protein, 12 aa, synthetic construct
  REGION 1..12: note = ATaRI peptide
QPSPMMQRSKDQ

SEQ ID NO: 6884 - protein, 48 aa, synthetic construct
  REGION 1..48: note = ATaRI peptide
DCVSYTESGLCCLCTPNFHNCPIENVLTCKIPLSDHWFLLLDNVIIQA

SEQ ID NO: 6885 - protein, 13 aa, synthetic construct
  REGION 1..13: note = ATaRI peptide
AQVFSQSVVSLFI

SEQ ID NO: 6886 - protein, 9 aa, synthetic construct
  REGION 1..9: note = ATaRI peptide
ALVKFKSHR

SEQ ID NO: 6887 - protein, 16 aa, synthetic construct
  REGION 1..16: note = ATaRI peptide
LFLGEPAMVSIRYFPG

SEQ ID NO: 6888 - protein, 50 aa, synthetic construct
  REGION 1..50: note = ATaRI peptide
PVFQLKKQVCQMQGPGRGVYVSETTCLLQRCWKGAVCLLSQTLSWADPAF

SEQ ID NO: 6889 - protein, 39 aa, synthetic construct
  REGION 1..39: note = ATaRI peptide
QNYLRMWSRCALTFLFWRGTVGQEVVTDAVLVLTSRHTQ

SEQ ID NO: 6890 - protein, 9 aa, synthetic construct
  REGION 1..9: note = ATaRI peptide
AHEYQQYLK

SEQ ID NO: 6891 - protein, 16 aa, synthetic construct
  REGION 1..16: note = ATaRI peptide
RSGLGLPSGNIAGGRE

SEQ ID NO: 6892 - protein, 36 aa, synthetic construct
  REGION 1..36: note = ATaRI peptide
RNAEYNPKVRSILMYFFFFSFLSPLPCLYILMYFTL

SEQ ID NO: 6893 - protein, 9 aa, synthetic construct
  REGION 1..9: note = ATaRI peptide
QFDFESTVR

SEQ ID NO: 6894 - protein, 13 aa, synthetic construct
  REGION 1..13: note = ATaRI peptide
LEGKKWRVVSEAF

SEQ ID NO: 6895 - protein, 17 aa, synthetic construct
  REGION 1..17: note = ATaRI peptide
NSQDIQIQVSRAFPTML

SEQ ID NO: 6896 - protein, 9 aa, synthetic construct
  REGION 1..9: note = ATaRI peptide
SIMHLSGIK

SEQ ID NO: 6897 - protein, 11 aa, synthetic construct
  REGION 1..11: note = ATaRI peptide
RLLVCFYEVSY

SEQ ID NO: 6898 - protein, 9 aa, synthetic construct
  REGION 1..9: note = ATaRI peptide
PSSNVSITT

SEQ ID NO: 6899 - protein, 12 aa, synthetic construct
  REGION 1..12: note = ATaRI peptide
ECFDHYYRRYVH

SEQ ID NO: 6900 - protein, 30 aa, synthetic construct
  REGION 1..30: note = ATaRI peptide
HCSLPEDLVSISGWCGLGLIVPLMISVTRK

SEQ ID NO: 6901 - protein, 25 aa, synthetic construct
  REGION 1..25: note = ATaRI peptide
SKAALSVHGESHSWDSLLSIPRSPP

SEQ ID NO: 6902 - protein, 15 aa, synthetic construct
  REGION 1..15: note = ATaRI peptide
QLQDVPLGGMGRTVF

SEQ ID NO: 6903 - protein, 18 aa, synthetic construct
  REGION 1..18: note = ATaRI peptide
ACGSNLHQVRLGFVKGVL

SEQ ID NO: 6904 - protein, 28 aa, synthetic construct
  REGION 1..28: note = ATaRI peptide
GTVFFAGEVWILIPNPIICILISVFHLK

SEQ ID NO: 6905 - protein, 10 aa, synthetic construct
  REGION 1..10: note = ATaRI peptide
SVMWNRTQVP

SEQ ID NO: 6906 - protein, 37 aa, synthetic construct
  REGION 1..37: note = ATaRI peptide
LRSPDSPKSKDLFISFLILLGMAFPSFKAYGRKDAKV

SEQ ID NO: 6907 - protein, 9 aa, synthetic construct
  REGION 1..9: note = ATaRI peptide
KSKNNVQWM

SEQ ID NO: 6908 - protein, 19 aa, synthetic construct
  REGION 1..19: note = ATaRI peptide
LTEDSENQRYPLCRQFSGG

SEQ ID NO: 6909 - protein, 34 aa, synthetic construct
  REGION 1..34: note = ATaRI peptide
LEVPDSIEVRRQRLCSSAKIFVECLKLNDSLTHS

SEQ ID NO: 6910 - protein, 16 aa, synthetic construct
  REGION 1..16: note = ATaRI peptide
NIPKPASKGKNSTFVF

SEQ ID NO: 6911 - protein, 110 aa, synthetic construct
  REGION 1..110: note = ATaRI peptide
RARPAPRGRYCPSPATALGRWSCSDLRLLPQPSGAARLLLRALRRPRPPACPVSLHRPAGRAASHSLRMRPCYVRCALPGSQRPTLCLLLHRPCCRLCNHRNNLGIVYRP

SEQ ID NO: 6912 - protein, 61 aa, synthetic construct
  REGION 1..61: note = ATaRI peptide
SVAPVFTVVSMYSTLEIVQKVLPIHKLTRWTVGQDTTYFELYNHHSYMSWLLCLASDLSAC

SEQ ID NO: 6913 - protein, 10 aa, synthetic construct
  REGION 1..10: note = ATaRI peptide
KQGNVTSFGE

SEQ ID NO: 6914 - protein, 20 aa, synthetic construct
  REGION 1..20: note = ATaRI peptide
IEALLQYWVSLFLFSFLGLF

SEQ ID NO: 6915 - protein, 9 aa, synthetic construct
  REGION 1..9: note = ATaRI peptide
HILLQNGKR

SEQ ID NO: 6916 - protein, 9 aa, synthetic construct
  REGION 1..9: note = ATaRI peptide
SKWSDPQVL

SEQ ID NO: 6917 - protein, 24 aa, synthetic construct
  REGION 1..24: note = ATaRI peptide
FSALALAEVSRSPCVCTKQTKFKN

SEQ ID NO: 6918 - protein, 12 aa, synthetic construct
  REGION 1..12: note = ATaRI peptide
ESFDLMIKGMKK

SEQ ID NO: 6919 - protein, 27 aa, synthetic construct
  REGION 1..27: note = ATaRI peptide
QYMAELIEVGNLIVIWFKFMYFSIKLR

SEQ ID NO: 6920 - protein, 60 aa, synthetic construct
  REGION 1..60: note = ATaRI peptide
LSSKDLKLVSNQTCSKCCLALLNFKNPIIVGKKQFFYCTSKLYTFYFLRRYFPLNDLRNI

SEQ ID NO: 6921 - protein, 9 aa, synthetic construct
  REGION 1..9: note = ATaRI peptide
VLENAGLRT

SEQ ID NO: 6922 - protein, 27 aa, synthetic construct
  REGION 1..27: note = ATaRI peptide
VLRGDDLSVSFLFFIPSSKKLCLISLE

SEQ ID NO: 6923 - protein, 9 aa, synthetic construct
  REGION 1..9: note = ATaRI peptide
TKLSPEPLK

SEQ ID NO: 6924 - protein, 16 aa, synthetic construct
  REGION 1..16: note = ATaRI peptide
TSLDISDNGKSDIEKK

SEQ ID NO: 6925 - protein, 9 aa, synthetic construct
  REGION 1..9: note = ATaRI peptide
ALQINTKLR

SEQ ID NO: 6926 - protein, 9 aa, synthetic construct
  REGION 1..9: note = ATaRI peptide
GIDILNKIR

SEQ ID NO: 6927 - protein, 49 aa, synthetic construct
  REGION 1..49: note = ATaRI peptide
LSHCHHKLVSAVHILSRTSCFSSAVMQDDFRCGDVISFLYFTLLQLYGL

SEQ ID NO: 6928 - protein, 39 aa, synthetic construct
  REGION 1..39: note = ATaRI peptide
KQQPTQAAVGGLQERPHLSHTLFFSGESWRVLLKCFAQT

SEQ ID NO: 6929 - protein, 9 aa, synthetic construct
  REGION 1..9: note = ATaRI peptide
KKVTKMDSK

SEQ ID NO: 6930 - protein, 20 aa, synthetic construct
  REGION 1..20: note = ATaRI peptide
KRAACAQKVRVDLFLIHSFI

SEQ ID NO: 6931 - protein, 31 aa, synthetic construct
  REGION 1..31: note = ATaRI peptide
ERSDGGGAGKSGHCHHPLRKSAYLLIAESHD

SEQ ID NO: 6932 - protein, 64 aa, synthetic construct
  REGION 1..64: note = ATaRI peptide
KPRTASRPGKSFAVRELHCDQVASQSQLDQTLQVVSGAAGERGTAASAGGDHKKPMQSCESDES

SEQ ID NO: 6933 - protein, 19 aa, synthetic construct
  REGION 1..19: note = ATaRI peptide
SPRTFSQEGKDCKDFFSLG

SEQ ID NO: 6934 - protein, 9 aa, synthetic construct
  REGION 1..9: note = ATaRI peptide
LKTYARATR

SEQ ID NO: 6935 - protein, 23 aa, synthetic construct
  REGION 1..23: note = ATaRI peptide
ALVELKVAGEPPGFVLRTFLCRI

SEQ ID NO: 6936 - protein, 50 aa, synthetic construct
  REGION 1..50: note = ATaRI peptide
LSLCALVSGRDVCHLLLSPLRKEHQPCSLQRERRKNCGVVDLSFHSEHVH

SEQ ID NO: 6937 - protein, 23 aa, synthetic construct
  REGION 1..23: note = ATaRI peptide
ALVELKVAGEPPGFVLRTFLCRI

SEQ ID NO: 6938 - protein, 24 aa, synthetic construct
  REGION 1..24: note = ATaRI peptide
KTASISIAGQYLLGLRFSELGCGS

SEQ ID NO: 6939 - protein, 10 aa, synthetic construct
  REGION 1..10: note = ATaRI peptide
GERHSAYNGE

SEQ ID NO: 6940 - protein, 9 aa, synthetic construct
  REGION 1..9: note = ATaRI peptide
KESVIFIPG

SEQ ID NO: 6941 - protein, 10 aa, synthetic construct
  REGION 1..10: note = ATaRI peptide
HRFNKSQQVY

SEQ ID NO: 6942 - protein, 46 aa, synthetic construct
  REGION 1..46: note = ATaRI peptide
VRFASEDIGECDGRVPESYVHEGGEMANSYIVAFFFFFFAGRGGRG

SEQ ID NO: 6943 - protein, 10 aa, synthetic construct
  REGION 1..10: note = ATaRI peptide
VPQESQERGE

SEQ ID NO: 6944 - protein, 50 aa, synthetic construct
  REGION 1..50: note = ATaRI peptide
NFRNMFSLGKERCGYYCHFRFFVCLLFMCIVATAFLKDIVKFNSGSSRGI

SEQ ID NO: 6945 - protein, 14 aa, synthetic construct
  REGION 1..14: note = ATaRI peptide
PNNRGVLRGTYSCM

SEQ ID NO: 6946 - protein, 69 aa, synthetic construct
  REGION 1..69: note = ATaRI peptide
VFNPVRSQVSRMPKLVGISVVVFLPHSMFLALLLAHTHHRESHSGGIVPLPSPCHRISQSVLHHSRSLY

SEQ ID NO: 6947 - protein, 9 aa, synthetic construct
  REGION 1..9: note = ATaRI peptide
GEASGKPNR

SEQ ID NO: 6948 - protein, 14 aa, synthetic construct
  REGION 1..14: note = ATaRI peptide
NHGSLVSLGKTKGH

SEQ ID NO: 6949 - protein, 20 aa, synthetic construct
  REGION 1..20: note = ATaRI peptide
GKETLQRAGTRGHGRLPYLL

SEQ ID NO: 6950 - protein, 9 aa, synthetic construct
  REGION 1..9: note = ATaRI peptide
VFYTCTNCK

SEQ ID NO: 6951 - protein, 13 aa, synthetic construct
  REGION 1..13: note = ATaRI peptide
FYDSGLLQVCALG

SEQ ID NO: 6952 - protein, 49 aa, synthetic construct
  REGION 1..49: note = ATaRI peptide
RYFLWPLQVDQLRVAPLLVGTRTHRHTHAHMHTHTHAHTYMPSAPRGVR

SEQ ID NO: 6953 - protein, 35 aa, synthetic construct
  REGION 1..35: note = ATaRI peptide
PEKNRINKVTVVARSVTLTPFSTFWPWWSNFPLLN

SEQ ID NO: 6954 - protein, 18 aa, synthetic construct
  REGION 1..18: note = ATaRI peptide
EKAKKAEQVCIWCWGKVE

SEQ ID NO: 6955 - protein, 9 aa, synthetic construct
  REGION 1..9: note = ATaRI peptide
IIFYAPYTG

SEQ ID NO: 6956 - protein, 24 aa, synthetic construct
  REGION 1..24: note = ATaRI peptide
MYERLRQEVSQCKSGLRLQWEGCG

SEQ ID NO: 6957 - protein, 9 aa, synthetic construct
  REGION 1..9: note = ATaRI peptide
VYKGPNCIE

SEQ ID NO: 6958 - protein, 38 aa, synthetic construct
  REGION 1..38: note = ATaRI peptide
LMHVLKAEVERAPPHGDPQRLGPGCLLWLPLGCLFAAR

SEQ ID NO: 6959 - protein, 83 aa, synthetic construct
  REGION 1..83: note = ATaRI peptide
VPSSRSNSGKLHYGQNLFIYLFGYSFTPLSKRLFRTIWETEETIKVNTCLTGIYNNIRESSYMYLKYEVTVCSPVIECSEQKA

SEQ ID NO: 6960 - protein, 11 aa, synthetic construct
  REGION 1..11: note = ATaRI peptide
SLEDHSSQGEH

SEQ ID NO: 6961 - protein, 11 aa, synthetic construct
  REGION 1..11: note = ATaRI peptide
LPPVPPFQVKQ

SEQ ID NO: 6962 - protein, 11 aa, synthetic construct
  REGION 1..11: note = ATaRI peptide
KDAVDLMKVGL

SEQ ID NO: 6963 - protein, 118 aa, synthetic construct
  REGION 1..118: note = ATaRI peptide
FAPPAAAAGEWGSWRSPAERERRGVSGGPGGLPRALCGQGGAQVCCLECRELDAACSRHTSALLSHLPSLFFFFFFFFFFFFFLRRSLCRLGCSAVARSWLTASAASRVHAILLPQPP

SEQ ID NO: 6964 - protein, 25 aa, synthetic construct
  REGION 1..25: note = ATaRI peptide
KTSAAEGPGEKRGQFLEMGKLLSRQ

SEQ ID NO: 6965 - protein, 18 aa, synthetic construct
  REGION 1..18: note = ATaRI peptide
AAARQGPDGESAQWGTRS

SEQ ID NO: 6966 - protein, 40 aa, synthetic construct
  REGION 1..40: note = ATaRI peptide
QENDDGWAGKWILRVKNLDLERQNLMRKKKYRVMWVKGRH

SEQ ID NO: 6967 - protein, 29 aa, synthetic construct
  REGION 1..29: note = ATaRI peptide
WGPPGDYPVSVSNKGLRGSAVGNWCQLSN

SEQ ID NO: 6968 - protein, 15 aa, synthetic construct
  REGION 1..15: note = ATaRI peptide
YPPGVHPSGKGAWEE

SEQ ID NO: 6969 - protein, 25 aa, synthetic construct
  REGION 1..25: note = ATaRI peptide
DAVKLGLPVSRDIGAGEVWDEQECV

SEQ ID NO: 6970 - protein, 40 aa, synthetic construct
  REGION 1..40: note = ATaRI peptide
GLRMQAMHRCEGQERSRTDGMGPWVSPCCLLASKPQHPRS

SEQ ID NO: 6971 - protein, 22 aa, synthetic construct
  REGION 1..22: note = ATaRI peptide
RFRSADHDRYRGWSMWDEIDVM

SEQ ID NO: 6972 - protein, 43 aa, synthetic construct
  REGION 1..43: note = ATaRI peptide
VVLLQKLQVCVCVQACICAHVPGTWVHKQRCCLSEPVGALWLS

SEQ ID NO: 6973 - protein, 30 aa, synthetic construct
  REGION 1..30: note = ATaRI peptide
VKYGSVIQVRLACLSPACPSPCLRGWAGAG

SEQ ID NO: 6974 - protein, 21 aa, synthetic construct
  REGION 1..21: note = ATaRI peptide
HLEEVLKGVRTGNPCPAQLAT

SEQ ID NO: 6975 - protein, 58 aa, synthetic construct
  REGION 1..58: note = ATaRI peptide
QKTDSFVPRWVCAMCLGVDWWCSGWALLSLGLSGSPTPPPSCGPLASGVSVGPIPLGI

SEQ ID NO: 6976 - protein, 40 aa, synthetic construct
  REGION 1..40: note = ATaRI peptide
EKNKLTFEVAGGVPRGWGSVELLLAPHWPRSSPRSRLWDP

SEQ ID NO: 6977 - protein, 25 aa, synthetic construct
  REGION 1..25: note = ATaRI peptide
LQAYEDPGGEAFARLGPPWWSSASS

SEQ ID NO: 6978 - protein, 9 aa, synthetic construct
  REGION 1..9: note = ATaRI peptide
QAEAMFGVG

SEQ ID NO: 6979 - protein, 16 aa, synthetic construct
  REGION 1..16: note = ATaRI peptide
ENYQIVKGVSGQGSSG

SEQ ID NO: 6980 - protein, 64 aa, synthetic construct
  REGION 1..64: note = ATaRI peptide
CQDMIMTEVRAGLRGAQASWGGGPEQRLGGKATELEKSDGGSQKEHSAADHGGDAEGEVRLQMW

SEQ ID NO: 6981 - protein, 103 aa, synthetic construct
  REGION 1..103: note = ATaRI peptide
CIRTLAMVGECAGALASPKPLLLPLTVGTPALLINTLSLSSPISCSQVVVSKFFLASASSWQLREAVFSSGSVPQRRMLADILQLVFYGYLQMGSGRSRPVDC

SEQ ID NO: 6982 - protein, 50 aa, synthetic construct
  REGION 1..50: note = ATaRI peptide
HELFYSILVRPSGWAGAGWGHGVVGASHELLAVPRHQSVCPVLLLLGWEQ

SEQ ID NO: 6983 - protein, 21 aa, synthetic construct
  REGION 1..21: note = ATaRI peptide
RLPNNHSTGLGGFLSWAGCGE

SEQ ID NO: 6984 - protein, 48 aa, synthetic construct
  REGION 1..48: note = ATaRI peptide
LKTTCFICGEGCFLLCGGRSGAGTSSDASGSSGLALPALGNPGPELMT

SEQ ID NO: 6985 - protein, 41 aa, synthetic construct
  REGION 1..41: note = ATaRI peptide
RGESCLVHWYVCLLLNSALAYSGRLGFPSSVFPCVNNGFTS

SEQ ID NO: 6986 - protein, 26 aa, synthetic construct
  REGION 1..26: note = ATaRI peptide
QFLHGQCPGKDGSHSTTDHGTCLGQP

SEQ ID NO: 6987 - protein, 21 aa, synthetic construct
  REGION 1..21: note = ATaRI peptide
SHTRVNEQVGRKGGFPSSIQL

SEQ ID NO: 6988 - protein, 39 aa, synthetic construct
  REGION 1..39: note = ATaRI peptide
AGMDSNYQVAGRVGAPPISRDSVILQKAQGPCCWAVLFI

SEQ ID NO: 6989 - protein, 16 aa, synthetic construct
  REGION 1..16: note = ATaRI peptide
DSISQKSQGKVTLPYE

SEQ ID NO: 6990 - protein, 28 aa, synthetic construct
  REGION 1..28: note = ATaRI peptide
PPRFSQLRVSRGGTERNVCLFPVFAGIT

SEQ ID NO: 6991 - protein, 38 aa, synthetic construct
  REGION 1..38: note = ATaRI peptide
RAERFRIQVGQGEWRCSQALPHSSGWDRASQNHLLPHT

SEQ ID NO: 6992 - protein, 129 aa, synthetic construct
  REGION 1..129: note = ATaRI peptide
HVFSTVDVVGGVLGPGGAGLGCSPEASSPIAGHRCGAVLAPGQCLANVWFMNGAQQHSGRSPFTVMRLTRRGNRDWPRALGTGGSSFFFFFLRDGVSLCCPGLPCTPGFRQVTHLSLPRNWIIGVSHRP

SEQ ID NO: 6993 - protein, 82 aa, synthetic construct
  REGION 1..82: note = ATaRI peptide
VHACEGCKVRTGGSGGWPLRLWSHGELTLHKAFLALGWGPDCTYCRIPAQEAARPLCSRPQLWALQEKRGFPCQAYPAGHLC

SEQ ID NO: 6994 - protein, 9 aa, synthetic construct
  REGION 1..9: note = ATaRI peptide
SSLRNFYDL

SEQ ID NO: 6995 - protein, 16 aa, synthetic construct
  REGION 1..16: note = ATaRI peptide
SPQQEEETGDPACDFS

SEQ ID NO: 6996 - protein, 9 aa, synthetic construct
  REGION 1..9: note = ATaRI peptide
GGLAFEACR

SEQ ID NO: 6997 - protein, 72 aa, synthetic construct
  REGION 1..72: note = ATaRI peptide
GDSDYNGSGEEQCSGRTEGARPSEEPALQAAALLGLRTRQPVLELPQTLGPLGREMALSQANHTLFFFLIAS

SEQ ID NO: 6998 - protein, 83 aa, synthetic construct
  REGION 1..83: note = ATaRI peptide
GYPSYPALVSLPQTPPSYLPCLALGANLIGLSQQSVVGVRVSLAVEGRGVLPQPEWVKLARLPAWSTKNRLKVCRSRPGFLEF

SEQ ID NO: 6999 - protein, 61 aa, synthetic construct
  REGION 1..61: note = ATaRI peptide
LFFDNKRTWLVGAAVRGLRGTPGVCASGAVLVRCTEGPWMLPVTLVSTCQQQACTWHVNSN

SEQ ID NO: 7000 - protein, 32 aa, synthetic construct
  REGION 1..32: note = ATaRI peptide
KNIRIGIEGKKKKKIPVNIQVGSIATAYILKI

SEQ ID NO: 7001 - protein, 10 aa, synthetic construct
  REGION 1..10: note = ATaRI peptide
MPIEPGDIGM

SEQ ID NO: 7002 - protein, 10 aa, synthetic construct
  REGION 1..10: note = ATaRI peptide
FFRQRVSSGN

SEQ ID NO: 7003 - protein, 16 aa, synthetic construct
  REGION 1..16: note = ATaRI peptide
DAQLSRNSSKSFLLPS

SEQ ID NO: 7004 - protein, 26 aa, synthetic construct
  REGION 1..26: note = ATaRI peptide
PITWRLLSVSSTHCVEKCEPHTALLA

SEQ ID NO: 7005 - protein, 114 aa, synthetic construct
  REGION 1..114: note = ATaRI peptide
LLLEDGCEVRGKGSCGAEGRGWRERGSGEGGRCLAGLNEWQRGGGHQEEERSVCGGGGFLGREGRKRFWRERLKGLRWEVFGGEIGAEWEKGRKESSALGSPGGPQGLGRGRRP

SEQ ID NO: 7006 - protein, 82 aa, synthetic construct
  REGION 1..82: note = ATaRI peptide
ICSEYFIEVIMNSCSPLLFFFFFFFFLRQSLTLSTQARVQCHNLGSLQPPLPGLKQFLCLSLPSSWVPYRHMPPCLSKLLYF

SEQ ID NO: 7007 - protein, 12 aa, synthetic construct
  REGION 1..12: note = ATaRI peptide
IVLIRERKGEWV

SEQ ID NO: 7008 - protein, 85 aa, synthetic construct
  REGION 1..85: note = ATaRI peptide
VDWRDEPEVSVKVRRRWKSHLCFWMHGFKKPYQQTRNLQRQYEQSGISFLRGKYWGYPEWKTEGWGRYGGMWISCCIIGLSKTNG

SEQ ID NO: 7009 - protein, 16 aa, synthetic construct
  REGION 1..16: note = ATaRI peptide
SDWMVVGKVGFQENVP

SEQ ID NO: 7010 - protein, 13 aa, synthetic construct
  REGION 1..13: note = ATaRI peptide
LHSVLQCKVRSCG

SEQ ID NO: 7011 - protein, 42 aa, synthetic construct
  REGION 1..42: note = ATaRI peptide
SELFEPYYGRDIEEGTRRYEGQPLYGDFRSEAVVIHMPYFLS

SEQ ID NO: 7012 - protein, 16 aa, synthetic construct
  REGION 1..16: note = ATaRI peptide
VHFLMADGVGYLFSID

SEQ ID NO: 7013 - protein, 9 aa, synthetic construct
  REGION 1..9: note = ATaRI peptide
TSRPANSER

SEQ ID NO: 7014 - protein, 9 aa, synthetic construct
  REGION 1..9: note = ATaRI peptide
KIHAFVQDT

SEQ ID NO: 7015 - protein, 19 aa, synthetic construct
  REGION 1..19: note = ATaRI peptide
SKFFELIQVRLVSVVDIKS

SEQ ID NO: 7016 - protein, 42 aa, synthetic construct
  REGION 1..42: note = ATaRI peptide
QKFLIGLGVSLQLASCPAWNGGFALCGIWTAACHTWYMFSWH

SEQ ID NO: 7017 - protein, 9 aa, synthetic construct
  REGION 1..9: note = ATaRI peptide
SRPDMNPIR

SEQ ID NO: 7018 - protein, 9 aa, synthetic construct
  REGION 1..9: note = ATaRI peptide
PADSIAPFQ

SEQ ID NO: 7019 - protein, 75 aa, synthetic construct
  REGION 1..75: note = ATaRI peptide
LMNKASNYGKKVPFSYQPQPPVPRTRKGQKPKGPDKAAGSKGVLWEGTSPQRLQTPLLGPAACGRAGLLLCSKGG

SEQ ID NO: 7020 - protein, 9 aa, synthetic construct
  REGION 1..9: note = ATaRI peptide
TQSLREQPE

SEQ ID NO: 7021 - protein, 9 aa, synthetic construct
  REGION 1..9: note = ATaRI peptide
RRSRSPRRR

SEQ ID NO: 7022 - protein, 15 aa, synthetic construct
  REGION 1..15: note = ATaRI peptide
IQRQAIVQVCDFNEK

SEQ ID NO: 7023 - protein, 35 aa, synthetic construct
  REGION 1..35: note = ATaRI peptide
DMFAAYFDVSYFKSSVKTKKNNKYIGAYIHIEKEE

SEQ ID NO: 7024 - protein, 9 aa, synthetic construct
  REGION 1..9: note = ATaRI peptide
CPFLLGLTQ

SEQ ID NO: 7025 - protein, 41 aa, synthetic construct
  REGION 1..41: note = ATaRI peptide
RRNTATWKVKQAPSTFWAPVTLGPAISHGDQGCLTISSLNH

SEQ ID NO: 7026 - protein, 69 aa, synthetic construct
  REGION 1..69: note = ATaRI peptide
KRRPPKMTGYVGPELDGLYLPRGQEPTHPHPLPLQGTHVHQILPGWGKGCGEKGAEETSAWGQGAGIRK

SEQ ID NO: 7027 - protein, 33 aa, synthetic construct
  REGION 1..33: note = ATaRI peptide
KDDVSTFPCESCPTVWTLSYLKHSHYLFFLSAW

SEQ ID NO: 7028 - protein, 9 aa, synthetic construct
  REGION 1..9: note = ATaRI peptide
ELPADLEMV

SEQ ID NO: 7029 - protein, 20 aa, synthetic construct
  REGION 1..20: note = ATaRI peptide
LFAVRFAKVSGFSILKIGYI

SEQ ID NO: 7030 - protein, 25 aa, synthetic construct
  REGION 1..25: note = ATaRI peptide
MQDWCASDVSFFWVRGIGGKWKREE

SEQ ID NO: 7031 - protein, 15 aa, synthetic construct
  REGION 1..15: note = ATaRI peptide
LPVSRLLAGKAFPLK

SEQ ID NO: 7032 - protein, 14 aa, synthetic construct
  REGION 1..14: note = ATaRI peptide
KFPELLPLVSGAYI

SEQ ID NO: 7033 - protein, 11 aa, synthetic construct
  REGION 1..11: note = ATaRI peptide
DKDVVMLQVMN

SEQ ID NO: 7034 - protein, 9 aa, synthetic construct
  REGION 1..9: note = ATaRI peptide
VIEAVAHFK

SEQ ID NO: 7035 - protein, 9 aa, synthetic construct
  REGION 1..9: note = ATaRI peptide
STSAVLDHR

SEQ ID NO: 7036 - protein, 9 aa, synthetic construct
  REGION 1..9: note = ATaRI peptide
IMHAHCWQR

SEQ ID NO: 7037 - protein, 12 aa, synthetic construct
  REGION 1..12: note = ATaRI peptide
LRKEESTPSKFW

SEQ ID NO: 7038 - protein, 17 aa, synthetic construct
  REGION 1..17: note = ATaRI peptide
CAYTIQSIGKRFTAVSL

SEQ ID NO: 7039 - protein, 9 aa, synthetic construct
  REGION 1..9: note = ATaRI peptide
KTLHQYTGR

SEQ ID NO: 7040 - protein, 20 aa, synthetic construct
  REGION 1..20: note = ATaRI peptide
VPSPPDIQGNLYFLSKRRES

SEQ ID NO: 7041 - protein, 9 aa, synthetic construct
  REGION 1..9: note = ATaRI peptide
LEGERDAIR

SEQ ID NO: 7042 - protein, 9 aa, synthetic construct
  REGION 1..9: note = ATaRI peptide
GSGVGIFLR

SEQ ID NO: 7043 - protein, 9 aa, synthetic construct
  REGION 1..9: note = ATaRI peptide
YGETDQGLR

SEQ ID NO: 7044 - protein, 24 aa, synthetic construct
  REGION 1..24: note = ATaRI peptide
SPGHPAVQVENYWHSLFLMFGIIE

SEQ ID NO: 7045 - protein, 18 aa, synthetic construct
  REGION 1..18: note = ATaRI peptide
CLLLEDAMVKVMLLIFVL

SEQ ID NO: 7046 - protein, 18 aa, synthetic construct
  REGION 1..18: note = ATaRI peptide
KRLALVDPGKKHRSESSG

SEQ ID NO: 7047 - protein, 18 aa, synthetic construct
  REGION 1..18: note = ATaRI peptide
QSCLPHDIRYSEWLEGRD

SEQ ID NO: 7048 - protein, 28 aa, synthetic construct
  REGION 1..28: note = ATaRI peptide
DIRAKEKEVYSLRLVYGEFCGVENEGTG

SEQ ID NO: 7049 - protein, 39 aa, synthetic construct
  REGION 1..39: note = ATaRI peptide
EEDGHHEEGTKPGGWPAPGPGWGGDVQREPGRTAEPRRR

SEQ ID NO: 7050 - protein, 33 aa, synthetic construct
  REGION 1..33: note = ATaRI peptide
SDSSGETKVCLGCLCERREGSGVPLPFWPRTGG

SEQ ID NO: 7051 - protein, 47 aa, synthetic construct
  REGION 1..47: note = ATaRI peptide
PTSFTLMPGESRGAGRDSSFLGQIKHAKSVFRAGTKRTSFPAQKEGE

SEQ ID NO: 7052 - protein, 32 aa, synthetic construct
  REGION 1..32: note = ATaRI peptide
TQTSSSGTGIARSPVTLPPCLPPRGLAVGAQQ

SEQ ID NO: 7053 - protein, 57 aa, synthetic construct
  REGION 1..57: note = ATaRI peptide
SGPSSDSEVPEPWQGEEREGQHLGHQLLVRLWRAQQSLSEWILGHWDGCRRRKGNVI

SEQ ID NO: 7054 - protein, 50 aa, synthetic construct
  REGION 1..50: note = ATaRI peptide
HMHRGVLVRCEHTYMNVLLCPRILPQSTQIHTTPAITPMPEGHTQTYFVQ

SEQ ID NO: 7055 - protein, 13 aa, synthetic construct
  REGION 1..13: note = ATaRI peptide
CALNDDLSVSAWP

SEQ ID NO: 7056 - protein, 9 aa, synthetic construct
  REGION 1..9: note = ATaRI peptide
SRGKANLTK

SEQ ID NO: 7057 - protein, 9 aa, synthetic construct
  REGION 1..9: note = ATaRI peptide
QSHFGEKNG

SEQ ID NO: 7058 - protein, 9 aa, synthetic construct
  REGION 1..9: note = ATaRI peptide
LAEAAIRFE

SEQ ID NO: 7059 - protein, 80 aa, synthetic construct
  REGION 1..80: note = ATaRI peptide
AERRNVKRVRPPGAAAARTAPPGGPTRNSSHRARVEGHRRAETWGVQLTHGGSGPSPSHIWGLRILPWVDIGNPEGPCQF

SEQ ID NO: 7060 - protein, 50 aa, synthetic construct
  REGION 1..50: note = ATaRI peptide
GGRMEEYRGKSPFPAVRCPPLPLAACAHARGGRGGDEETLWGLRGGQPGG

SEQ ID NO: 7061 - protein, 13 aa, synthetic construct
  REGION 1..13: note = ATaRI peptide
SAKQCKARWYVSV

SEQ ID NO: 7062 - protein, 13 aa, synthetic construct
  REGION 1..13: note = ATaRI peptide
PDPIDMDEGKCML

SEQ ID NO: 7063 - protein, 13 aa, synthetic construct
  REGION 1..13: note = ATaRI peptide
REKQLEEARYVWI

SEQ ID NO: 7064 - protein, 9 aa, synthetic construct
  REGION 1..9: note = ATaRI peptide
QDLDGELRS

SEQ ID NO: 7065 - protein, 12 aa, synthetic construct
  REGION 1..12: note = ATaRI peptide
NTVLSTPFRYCK

SEQ ID NO: 7066 - protein, 55 aa, synthetic construct
  REGION 1..55: note = ATaRI peptide
DPSYVKQMVNVNSLLILLNFFLISHGCQIKISPVSAYHIYLKNLYTCGCQKKNYL

SEQ ID NO: 7067 - protein, 28 aa, synthetic construct
  REGION 1..28: note = ATaRI peptide
ADVDARKQVGNCTERSVSLAECVSRLEE

SEQ ID NO: 7068 - protein, 9 aa, synthetic construct
  REGION 1..9: note = ATaRI peptide
FSKEELKKV

SEQ ID NO: 7069 - protein, 294 aa, synthetic construct
  REGION 1..294: note = ATaRI peptide
KTLPVAFKVRGYTAPRPRPGAAEPARRCLPAHGAGPRTSSKTSCLGGSNPRNPRPGLPPDALAGSGLSPSAQIPPSPTCARCHPDFSPSPPDPFSTPHASCLALILTHSFAPSPFPPGSPKYPLLHCERTCSTPPLSRGRGSPALSPGAPASFRDIPAWPHCGLPAQPLFGAPRALTRFPHSQTPLLRSRRPLPRPAEFSGPGPSRAPVPGFVGCRCRALVPGAGRGVLTEARGLRYQCPGGSWTNLGSPEEGVSGRGRLLCSLTRARSRYREEGGAAGASASPEAGAFRGPGR

SEQ ID NO: 7070 - protein, 29 aa, synthetic construct
  REGION 1..29: note = ATaRI peptide
RFVGRSGRGRSLTFDTDNRISTLGSFDEM

SEQ ID NO: 7071 - protein, 15 aa, synthetic construct
  REGION 1..15: note = ATaRI peptide
VDGPREPRSKYSPFY

SEQ ID NO: 7072 - protein, 13 aa, synthetic construct
  REGION 1..13: note = ATaRI peptide
PQGQSQITGKTDS

SEQ ID NO: 7073 - protein, 38 aa, synthetic construct
  REGION 1..38: note = ATaRI peptide
TDVPRRISGKDRALTKNPSLHRGRGEWDGLSLSHPCSQ

SEQ ID NO: 7074 - protein, 10 aa, synthetic construct
  REGION 1..10: note = ATaRI peptide
LQQMDSHGGE

SEQ ID NO: 7075 - protein, 61 aa, synthetic construct
  REGION 1..61: note = ATaRI peptide
TLSKKSQAGETFNNCWAGQGWAGLGCLVVTVRFVSFVNYMLLLKSHFLLQMHIMALNPCIL

SEQ ID NO: 7076 - protein, 31 aa, synthetic construct
  REGION 1..31: note = ATaRI peptide
VLNESSQKCKYLVEIFLLYPRNKSYLVILLC

SEQ ID NO: 7077 - protein, 15 aa, synthetic construct
  REGION 1..15: note = ATaRI peptide
YAVAKLGPGKLCGPF

SEQ ID NO: 7078 - protein, 9 aa, synthetic construct
  REGION 1..9: note = ATaRI peptide
SEDEHYPLW

SEQ ID NO: 7079 - protein, 22 aa, synthetic construct
  REGION 1..22: note = ATaRI peptide
EIIHLISKVRCFCFSVNCLIYL

SEQ ID NO: 7080 - protein, 9 aa, synthetic construct
  REGION 1..9: note = ATaRI peptide
VPPPPPIAK

SEQ ID NO: 7081 - protein, 14 aa, synthetic construct
  REGION 1..14: note = ATaRI peptide
KDTCYSPKVRCIVV

SEQ ID NO: 7082 - protein, 115 aa, synthetic construct
  REGION 1..115: note = ATaRI peptide
ENNSLNPEVRGALGLAWASRFSLPDFQACLAELALPVLFLNLLLGHLPMPTRREGAEGKLRALLHVPPPMAVNSGCLACAECPSPFSRVWVHPGLCASVVHLLPGSSSSGGHGAP

SEQ ID NO: 7083 - protein, 29 aa, synthetic construct
  REGION 1..29: note = ATaRI peptide
STKMAEAIRYVKMMFFKHWLGVLFLVNQS

SEQ ID NO: 7084 - protein, 9 aa, synthetic construct
  REGION 1..9: note = ATaRI peptide
EEGLALLQV

SEQ ID NO: 7085 - protein, 15 aa, synthetic construct
  REGION 1..15: note = ATaRI peptide
TLKAPTLQVSAYLPY

SEQ ID NO: 7086 - protein, 81 aa, synthetic construct
  REGION 1..81: note = ATaRI peptide
ELASCNPVVCLIASVTRYFLKNRNFSLRELTNLQLFLSPLRLSSTEHLPVKSCQNLLPPLPPRTPCLPFANTQEPQKWTSV

SEQ ID NO: 7087 - protein, 9 aa, synthetic construct
  REGION 1..9: note = ATaRI peptide
VDCDQFTQV

SEQ ID NO: 7088 - protein, 25 aa, synthetic construct
  REGION 1..25: note = ATaRI peptide
PKVLVENASMFDSVYSLLLGMFLGS

SEQ ID NO: 7089 - protein, 10 aa, synthetic construct
  REGION 1..10: note = ATaRI peptide
KRDVKVSLCK

SEQ ID NO: 7090 - protein, 63 aa, synthetic construct
  REGION 1..63: note = ATaRI peptide
SPAETDLQACFFNCVFDFYSIVPIHMQKLIIIMGICRLLLFAWNLTVSILVYRILKTMLWLSL

SEQ ID NO: 7091 - protein, 18 aa, synthetic construct
  REGION 1..18: note = ATaRI peptide
EQNGALYEGKNSEPRFIS

SEQ ID NO: 7092 - protein, 46 aa, synthetic construct
  REGION 1..46: note = ATaRI peptide
VITKKKEEVSIRGVINSFLILIAYSSKQSRLEQQQKKPFLIIYTVI

SEQ ID NO: 7093 - protein, 23 aa, synthetic construct
  REGION 1..23: note = ATaRI peptide
DCDCRFPEVKIGNLEGLSCSGFI

SEQ ID NO: 7094 - protein, 9 aa, synthetic construct
  REGION 1..9: note = ATaRI peptide
HHSCHITYK

SEQ ID NO: 7095 - protein, 9 aa, synthetic construct
  REGION 1..9: note = ATaRI peptide
DFSGNPLTR

SEQ ID NO: 7096 - protein, 9 aa, synthetic construct
  REGION 1..9: note = ATaRI peptide
QSLPENIGK

SEQ ID NO: 7097 - protein, 24 aa, synthetic construct
  REGION 1..24: note = ATaRI peptide
NQLSELPQVSGNFTVSPQNIKQQQ

SEQ ID NO: 7098 - protein, 20 aa, synthetic construct
  REGION 1..20: note = ATaRI peptide
VLTENQLLVSVVCTYIIKTY

SEQ ID NO: 7099 - protein, 21 aa, synthetic construct
  REGION 1..21: note = ATaRI peptide
THSLGIQKVGFGNVFQHHPRS

SEQ ID NO: 7100 - protein, 9 aa, synthetic construct
  REGION 1..9: note = ATaRI peptide
EQVNKGDYG

SEQ ID NO: 7101 - protein, 41 aa, synthetic construct
  REGION 1..41: note = ATaRI peptide
EDDIQFVSVSSNDDWGFPRVKDYGGPLCNVTSPGHLMFMSV

SEQ ID NO: 7102 - protein, 30 aa, synthetic construct
  REGION 1..30: note = ATaRI peptide
NPSAYYSDVSTLYLCLFSFLIKCNSVLVVA

SEQ ID NO: 7103 - protein, 47 aa, synthetic construct
  REGION 1..47: note = ATaRI peptide
YRCTPPHPGNFCIFSRGGVSPCWPGWSRSLDLMICLPRPPRMVGLQT

SEQ ID NO: 7104 - protein, 34 aa, synthetic construct
  REGION 1..34: note = ATaRI peptide
KGKMDPDKVILKKNIRVVPDILIWSENETVYFFF

SEQ ID NO: 7105 - protein, 15 aa, synthetic construct
  REGION 1..15: note = ATaRI peptide
KSPRLMAQGNPLREV

SEQ ID NO: 7106 - protein, 35 aa, synthetic construct
  REGION 1..35: note = ATaRI peptide
NLKDPKNNVSMLCSYVYASNFPEYIGISDCNTVDL

SEQ ID NO: 7107 - protein, 34 aa, synthetic construct
  REGION 1..34: note = ATaRI peptide
QEAAMEIQVRIDMPCFIAQNMKIQKRFICLMFLK

SEQ ID NO: 7108 - protein, 29 aa, synthetic construct
  REGION 1..29: note = ATaRI peptide
DLNCKICIGNWKFFFVKFCIHYERRILRY

SEQ ID NO: 7109 - protein, 10 aa, synthetic construct
  REGION 1..10: note = ATaRI peptide
GSPEYLTEVL

SEQ ID NO: 7110 - protein, 22 aa, synthetic construct
  REGION 1..22: note = ATaRI peptide
KIKASGTKVRKTFFTIPAWENV

SEQ ID NO: 7111 - protein, 9 aa, synthetic construct
  REGION 1..9: note = ATaRI peptide
VALHQPLIR

SEQ ID NO: 7112 - protein, 9 aa, synthetic construct
  REGION 1..9: note = ATaRI peptide
AAIAYQELQ

SEQ ID NO: 7113 - protein, 10 aa, synthetic construct
  REGION 1..10: note = ATaRI peptide
IVCVHGLDGM

SEQ ID NO: 7114 - protein, 18 aa, synthetic construct
  REGION 1..18: note = ATaRI peptide
HLEKEPLESKYNKAPLSF

SEQ ID NO: 7115 - protein, 10 aa, synthetic construct
  REGION 1..10: note = ATaRI peptide
PTVDLLGLGK

SEQ ID NO: 7116 - protein, 45 aa, synthetic construct
  REGION 1..45: note = ATaRI peptide
EDPAPAKKVLLAPSADSPAQGTSVRNTTNLYFLSVETWQTYILSS

SEQ ID NO: 7117 - protein, 10 aa, synthetic construct
  REGION 1..10: note = ATaRI peptide
RKFPRISQVF

SEQ ID NO: 7118 - protein, 13 aa, synthetic construct
  REGION 1..13: note = ATaRI peptide
CRVSGVVLGTYWL

SEQ ID NO: 7119 - protein, 64 aa, synthetic construct
  REGION 1..64: note = ATaRI peptide
PPRWPWLPGRNVGARGARGRAGLGRSAALGQGFGEVAAAVQQRVGNALAAAVPSLVLAWRFDHM

SEQ ID NO: 7120 - protein, 37 aa, synthetic construct
  REGION 1..37: note = ATaRI peptide
QSFQVSEYGKSSSIYFGRKKHLLLSAEIREIFKRCII

SEQ ID NO: 7121 - protein, 9 aa, synthetic construct
  REGION 1..9: note = ATaRI peptide
HLNGTITAK

SEQ ID NO: 7122 - protein, 23 aa, synthetic construct
  REGION 1..23: note = ATaRI peptide
PSLNFTATVSWYIYFQSIAVSSA

SEQ ID NO: 7123 - protein, 14 aa, synthetic construct
  REGION 1..14: note = ATaRI peptide
RLKELSYMVISYRI

SEQ ID NO: 7124 - protein, 25 aa, synthetic construct
  REGION 1..25: note = ATaRI peptide
VQLVFKNKVRFKVMMFKRKLYISEV

SEQ ID NO: 7125 - protein, 40 aa, synthetic construct
  REGION 1..40: note = ATaRI peptide
MNSFAVFQVCFACYIEKILIFFTIANPFRISDHFEMLTFY

SEQ ID NO: 7126 - protein, 10 aa, synthetic construct
  REGION 1..10: note = ATaRI peptide
TKDYIDGVCK

SEQ ID NO: 7127 - protein, 11 aa, synthetic construct
  REGION 1..11: note = ATaRI peptide
GLTTTPVEVLY

SEQ ID NO: 7128 - protein, 15 aa, synthetic construct
  REGION 1..15: note = ATaRI peptide
NYLKDATEVMYSSFC

SEQ ID NO: 7129 - protein, 19 aa, synthetic construct
  REGION 1..19: note = ATaRI peptide
ERVQITAIGKNRVYHHLLV

SEQ ID NO: 7130 - protein, 12 aa, synthetic construct
  REGION 1..12: note = ATaRI peptide
LLGYRKYQVFRI

SEQ ID NO: 7131 - protein, 31 aa, synthetic construct
  REGION 1..31: note = ATaRI peptide
LTWRAEQEGNVLGPLEVVMLYEIYNLHEKNF

SEQ ID NO: 7132 - protein, 34 aa, synthetic construct
  REGION 1..34: note = ATaRI peptide
RLLLQTAEVWARGSYLKISVDNSLCWNTALFVIC

SEQ ID NO: 7133 - protein, 9 aa, synthetic construct
  REGION 1..9: note = ATaRI peptide
HVDLNVCTR

SEQ ID NO: 7134 - protein, 13 aa, synthetic construct
  REGION 1..13: note = ATaRI peptide
KLNLYLDSVSSKT

SEQ ID NO: 7135 - protein, 18 aa, synthetic construct
  REGION 1..18: note = ATaRI peptide
SIVDYYEPSKYALEFLIL

SEQ ID NO: 7136 - protein, 38 aa, synthetic construct
  REGION 1..38: note = ATaRI peptide
WNGGSNPQVFYKGSCTSLCSLLMSTFLKGCFVILKLNN

SEQ ID NO: 7137 - protein, 46 aa, synthetic construct
  REGION 1..46: note = ATaRI peptide
KFENKINLGEFTKYITGLRGHFSKTMECCIILLDQEMKAGRGGSRL

SEQ ID NO: 7138 - protein, 9 aa, synthetic construct
  REGION 1..9: note = ATaRI peptide
KSRQKEADM

SEQ ID NO: 7139 - protein, 19 aa, synthetic construct
  REGION 1..19: note = ATaRI peptide
ADRATVEQVQFKCVANSSF

SEQ ID NO: 7140 - protein, 26 aa, synthetic construct
  REGION 1..26: note = ATaRI peptide
GCISTGKEVSSSLDDWIFNFLISDTR

SEQ ID NO: 7141 - protein, 25 aa, synthetic construct
  REGION 1..25: note = ATaRI peptide
MLSNNKKLRYRHFTTHSYRKDKGRV

SEQ ID NO: 7142 - protein, 9 aa, synthetic construct
  REGION 1..9: note = ATaRI peptide
RNHETTNLS

SEQ ID NO: 7143 - protein, 28 aa, synthetic construct
  REGION 1..28: note = ATaRI peptide
FSEDQDNQVKLNAWQKVLMFYLIKSFSC

SEQ ID NO: 7144 - protein, 9 aa, synthetic construct
  REGION 1..9: note = ATaRI peptide
HLKPTICKQ

SEQ ID NO: 7145 - protein, 17 aa, synthetic construct
  REGION 1..17: note = ATaRI peptide
QYVESFFEVGFNLLDLL

SEQ ID NO: 7146 - protein, 39 aa, synthetic construct
  REGION 1..39: note = ATaRI peptide
LPSNWDPQACATILANFLFFCRDRVMLCCPGWCPAPGLK

SEQ ID NO: 7147 - protein, 17 aa, synthetic construct
  REGION 1..17: note = ATaRI peptide
LSSPDNFRVGQKKRNFI

SEQ ID NO: 7148 - protein, 9 aa, synthetic construct
  REGION 1..9: note = ATaRI peptide
GGTKGTVIK

SEQ ID NO: 7149 - protein, 10 aa, synthetic construct
  REGION 1..10: note = ATaRI peptide
GVLDIAGFGK

SEQ ID NO: 7150 - protein, 27 aa, synthetic construct
  REGION 1..27: note = ATaRI peptide
YVDNQDCIGMCFLTPPLKNIGRCSECV

SEQ ID NO: 7151 - protein, 115 aa, synthetic construct
  REGION 1..115: note = ATaRI peptide
PGEEEAAEVRSAAAGPFRGLSARGLLWKKGDPHWQPRREGRGVLVRVQSRDGRLGPEGRRGPWSNPDVPGFRAGAREELPKAPHRPPVRRSSRATSSLKKTGGRARWRTPVILAL

SEQ ID NO: 7152 - protein, 21 aa, synthetic construct
  REGION 1..21: note = ATaRI peptide
RDTINTSCGKCLEKIKNRKCS

SEQ ID NO: 7153 - protein, 32 aa, synthetic construct
  REGION 1..32: note = ATaRI peptide
DLAAKINQGLRCTSWLYISSLSFYSMSVIKMI

SEQ ID NO: 7154 - protein, 12 aa, synthetic construct
  REGION 1..12: note = ATaRI peptide
ITKKSYTEVSFT

SEQ ID NO: 7155 - protein, 11 aa, synthetic construct
  REGION 1..11: note = ATaRI peptide
CESRRRKERWV

SEQ ID NO: 7156 - protein, 16 aa, synthetic construct
  REGION 1..16: note = ATaRI peptide
TPWGRIILRYVFHPGS

SEQ ID NO: 7157 - protein, 11 aa, synthetic construct
  REGION 1..11: note = ATaRI peptide
NAYHMEAEVCT

SEQ ID NO: 7158 - protein, 43 aa, synthetic construct
  REGION 1..43: note = ATaRI peptide
SLAKDPTAGNPDMCLNCGSCVNSRIEDLLKIFMWSSMVNIVST

SEQ ID NO: 7159 - protein, 35 aa, synthetic construct
  REGION 1..35: note = ATaRI peptide
YQHLENLIRYVCIIHFIKGVKIRNLCLYLLDFSKS

SEQ ID NO: 7160 - protein, 11 aa, synthetic construct
  REGION 1..11: note = ATaRI peptide
CFPFHMSQVKY

SEQ ID NO: 7161 - protein, 42 aa, synthetic construct
  REGION 1..42: note = ATaRI peptide
RRLYAWLLGRYLMSVVMIGEKMEGDLSCISITKLYVCPEFKN

SEQ ID NO: 7162 - protein, 16 aa, synthetic construct
  REGION 1..16: note = ATaRI peptide
SLLDKPELGNVYCPRA

SEQ ID NO: 7163 - protein, 29 aa, synthetic construct
  REGION 1..29: note = ATaRI peptide
VKEWEDKKVILTIIFGIRLFIFLQSRTVT

SEQ ID NO: 7164 - protein, 31 aa, synthetic construct
  REGION 1..31: note = ATaRI peptide
QQLTHKDKVNPLILCTPPPPPHTHTHTNTEK

SEQ ID NO: 7165 - protein, 10 aa, synthetic construct
  REGION 1..10: note = ATaRI peptide
MQNFACSNGE

SEQ ID NO: 7166 - protein, 11 aa, synthetic construct
  REGION 1..11: note = ATaRI peptide
NKTTTRTKVCI

SEQ ID NO: 7167 - protein, 27 aa, synthetic construct
  REGION 1..27: note = ATaRI peptide
PPAIAKDKVRKNSSSHVFTILFQKLCW

SEQ ID NO: 7168 - protein, 9 aa, synthetic construct
  REGION 1..9: note = ATaRI peptide
QFFYAYIQR

SEQ ID NO: 7169 - protein, 20 aa, synthetic construct
  REGION 1..20: note = ATaRI peptide
EFMEAVSSKYVSLFNLYFSQ

SEQ ID NO: 7170 - protein, 14 aa, synthetic construct
  REGION 1..14: note = ATaRI peptide
AIKPAVLKGKWCWC

SEQ ID NO: 7171 - protein, 14 aa, synthetic construct
  REGION 1..14: note = ATaRI peptide
EEEKKVLNGKSINL

SEQ ID NO: 7172 - protein, 46 aa, synthetic construct
  REGION 1..46: note = ATaRI peptide
IAIYTKQKVNMSLKSEKKKIINVNLCTRSFSKHFFILFTSHYNSLR

SEQ ID NO: 7173 - protein, 28 aa, synthetic construct
  REGION 1..28: note = ATaRI peptide
EQFQTLVQVRIFIFRFNTGISYVSFPYS

SEQ ID NO: 7174 - protein, 17 aa, synthetic construct
  REGION 1..17: note = ATaRI peptide
QQMKSENEVNTFFNNFL

SEQ ID NO: 7175 - protein, 12 aa, synthetic construct
  REGION 1..12: note = ATaRI peptide
QNFIKGLQVRTQ

SEQ ID NO: 7176 - protein, 9 aa, synthetic construct
  REGION 1..9: note = ATaRI peptide
VNFIDCLVR

SEQ ID NO: 7177 - protein, 14 aa, synthetic construct
  REGION 1..14: note = ATaRI peptide
AALASGCTVRTFKS

SEQ ID NO: 7178 - protein, 10 aa, synthetic construct
  REGION 1..10: note = ATaRI peptide
AGLDSAVSGM

SEQ ID NO: 7179 - protein, 12 aa, synthetic construct
  REGION 1..12: note = ATaRI peptide
KFKEIQTQVEYK

SEQ ID NO: 7180 - protein, 16 aa, synthetic construct
  REGION 1..16: note = ATaRI peptide
PVYNNSHKGNSLYYLL

SEQ ID NO: 7181 - protein, 9 aa, synthetic construct
  REGION 1..9: note = ATaRI peptide
GEIIILWTR

SEQ ID NO: 7182 - protein, 21 aa, synthetic construct
  REGION 1..21: note = ATaRI peptide
GFQEQLLYCEFGLNYIYLISC

SEQ ID NO: 7183 - protein, 46 aa, synthetic construct
  REGION 1..46: note = ATaRI peptide
DERRRKATGNKLLTRNIQSFVFVAVNFAFITFIMPFERPFVLLIYL

SEQ ID NO: 7184 - protein, 10 aa, synthetic construct
  REGION 1..10: note = ATaRI peptide
DPAAITSEVC

SEQ ID NO: 7185 - protein, 12 aa, synthetic construct
  REGION 1..12: note = ATaRI peptide
NTKKKNVPGMPS

SEQ ID NO: 7186 - protein, 16 aa, synthetic construct
  REGION 1..16: note = ATaRI peptide
PFCSATCKVQYIKIFN

SEQ ID NO: 7187 - protein, 25 aa, synthetic construct
  REGION 1..25: note = ATaRI peptide
LHLKRFHQVSFFSSTIIFIMCFTEH

SEQ ID NO: 7188 - protein, 55 aa, synthetic construct
  REGION 1..55: note = ATaRI peptide
YQEETSFAGNYFFNYIIIDLLIVSSELQISLRILLRILSLYLCYLGRDCFIHICT

SEQ ID NO: 7189 - protein, 29 aa, synthetic construct
  REGION 1..29: note = ATaRI peptide
AQDPRKVRGEDHPLDSYSVPQAPVVGEAE

SEQ ID NO: 7190 - protein, 17 aa, synthetic construct
  REGION 1..17: note = ATaRI peptide
PQQCCLRHGKRVQRLLE

SEQ ID NO: 7191 - protein, 15 aa, synthetic construct
  REGION 1..15: note = ATaRI peptide
APEQLGLQVPTTTPS

SEQ ID NO: 7192 - protein, 20 aa, synthetic construct
  REGION 1..20: note = ATaRI peptide
IHCIEDFHRSGLASTLSHNV

SEQ ID NO: 7193 - protein, 9 aa, synthetic construct
  REGION 1..9: note = ATaRI peptide
PQKRMRRDW

SEQ ID NO: 7194 - protein, 9 aa, synthetic construct
  REGION 1..9: note = ATaRI peptide
YEEVKKELK

SEQ ID NO: 7195 - protein, 32 aa, synthetic construct
  REGION 1..32: note = ATaRI peptide
RISNSDLSGRLAGLRACAVVGSLPGVGRGRGR

SEQ ID NO: 7196 - protein, 38 aa, synthetic construct
  REGION 1..38: note = ATaRI peptide
RSIQGRQRGERLALGGASVRARHRVAHVCVHACVCLCA

SEQ ID NO: 7197 - protein, 78 aa, synthetic construct
  REGION 1..78: note = ATaRI peptide
PKRRNGSEGMLQAGVFFAVSHLGKQHVLSCVFGLKLCSVILAWNLMEKQLVSIKQGTGSSTPSPFLPSCLPSPKHRRG

SEQ ID NO: 7198 - protein, 41 aa, synthetic construct
  REGION 1..41: note = ATaRI peptide
LEFFVPPKVSYPIIPPSLGGPEEAPGQQLRVPGTAFGDRVV

SEQ ID NO: 7199 - protein, 9 aa, synthetic construct
  REGION 1..9: note = ATaRI peptide
DIQGCVDPG

SEQ ID NO: 7200 - protein, 35 aa, synthetic construct
  REGION 1..35: note = ATaRI peptide
SGSDSNNTGASGDSLLFPSHLSWTPTPSHGHPWAP

SEQ ID NO: 7201 - protein, 22 aa, synthetic construct
  REGION 1..22: note = ATaRI peptide
FNFQGKAKASVWGAPWGCSGQP

SEQ ID NO: 7202 - protein, 95 aa, synthetic construct
  REGION 1..95: note = ATaRI peptide
LERLMKNPVRRGPGSTARPRPTPFLCSASGFPQVHLPRLQTQKLSIRPSKSSLWGGGGEGGCPGDSELPVCPCVRAQLESKHGGAASRAPRPLLV

SEQ ID NO: 7203 - protein, 58 aa, synthetic construct
  REGION 1..58: note = ATaRI peptide
RPPLRLCHGECGRQVRSTLVRWALLTEVPGCLRDQSLPSSLWQPGWTSRKHPPTSQLL

SEQ ID NO: 7204 - protein, 17 aa, synthetic construct
  REGION 1..17: note = ATaRI peptide
DIHASDKSVRLKLSFFF

SEQ ID NO: 7205 - protein, 9 aa, synthetic construct
  REGION 1..9: note = ATaRI peptide
VLNLANCVR

SEQ ID NO: 7206 - protein, 39 aa, synthetic construct
  REGION 1..39: note = ATaRI peptide
RDTLFEVRRWDPGVSGRWAGTGQGGSPGRGGGLRVLGVK

SEQ ID NO: 7207 - protein, 10 aa, synthetic construct
  REGION 1..10: note = ATaRI peptide
EKTETPKNSK

SEQ ID NO: 7208 - protein, 47 aa, synthetic construct
  REGION 1..47: note = ATaRI peptide
TEGLLRAQVNSLYIYFVNIHIYTFEQTDRSGKIKPKMLTGILSEEQY

SEQ ID NO: 7209 - protein, 20 aa, synthetic construct
  REGION 1..20: note = ATaRI peptide
GTFALANEVSLIAIKITLCV

SEQ ID NO: 7210 - protein, 36 aa, synthetic construct
  REGION 1..36: note = ATaRI peptide
AFSKDLPRGTVIIYTADNVIFMRIRNYLVLFLLCLL

SEQ ID NO: 7211 - protein, 9 aa, synthetic construct
  REGION 1..9: note = ATaRI peptide
RIVLAAAGG

SEQ ID NO: 7212 - protein, 10 aa, synthetic construct
  REGION 1..10: note = ATaRI peptide
RRKRENMSGR

SEQ ID NO: 7213 - protein, 18 aa, synthetic construct
  REGION 1..18: note = ATaRI peptide
RLSVSNNQVLNSALNEIE

SEQ ID NO: 7214 - protein, 40 aa, synthetic construct
  REGION 1..40: note = ATaRI peptide
LNDSCSLPGRIFFSEFWFEKCGRAYIQLYNRHISSYWYAL

SEQ ID NO: 7215 - protein, 27 aa, synthetic construct
  REGION 1..27: note = ATaRI peptide
PGNTMHFEVRNFNGEKKIQHLGGWNFF

SEQ ID NO: 7216 - protein, 9 aa, synthetic construct
  REGION 1..9: note = ATaRI peptide
EKNEPEVQW

SEQ ID NO: 7217 - protein, 67 aa, synthetic construct
  REGION 1..67: note = ATaRI peptide
ERKNLEEKSKPAPNTLAFSSRPNSAFQGLQYRKVLCLSFRCSTVFCTICLYGNTDDHDTHIFVFLKL

SEQ ID NO: 7218 - protein, 9 aa, synthetic construct
  REGION 1..9: note = ATaRI peptide
WISQIEELR

SEQ ID NO: 7219 - protein, 32 aa, synthetic construct
  REGION 1..32: note = ATaRI peptide
RQTNVLSKVCFASSCPWFLLVTNVRVSIPLLV

SEQ ID NO: 7220 - protein, 11 aa, synthetic construct
  REGION 1..11: note = ATaRI peptide
RWLTVERKCKC

SEQ ID NO: 7221 - protein, 9 aa, synthetic construct
  REGION 1..9: note = ATaRI peptide
YLSAQLYFR

SEQ ID NO: 7222 - protein, 25 aa, synthetic construct
  REGION 1..25: note = ATaRI peptide
NVGCIPSKVSMCFVQHRDCFWLATN

SEQ ID NO: 7223 - protein, 18 aa, synthetic construct
  REGION 1..18: note = ATaRI peptide
LGAHILGPVSIVKPEKSH

SEQ ID NO: 7224 - protein, 26 aa, synthetic construct
  REGION 1..26: note = ATaRI peptide
LSQSKSNEVDQPNFYICLSGEKGILL

SEQ ID NO: 7225 - protein, 10 aa, synthetic construct
  REGION 1..10: note = ATaRI peptide
KLHVEYNKVS

SEQ ID NO: 7226 - protein, 35 aa, synthetic construct
  REGION 1..35: note = ATaRI peptide
TAASATTAGKFCFPQCFLKTNKLVLLNMKNVFIAN

SEQ ID NO: 7227 - protein, 20 aa, synthetic construct
  REGION 1..20: note = ATaRI peptide
KHKGHVTMVRGWGCCVLSLL

SEQ ID NO: 7228 - protein, 9 aa, synthetic construct
  REGION 1..9: note = ATaRI peptide
EFSRMLPIW

SEQ ID NO: 7229 - protein, 17 aa, synthetic construct
  REGION 1..17: note = ATaRI peptide
TLVITGKKVSCSHREFP

SEQ ID NO: 7230 - protein, 9 aa, synthetic construct
  REGION 1..9: note = ATaRI peptide
TLSESTMNT

SEQ ID NO: 7231 - protein, 27 aa, synthetic construct
  REGION 1..27: note = ATaRI peptide
GGKTCTLKRCCKFIFCCICQFELISVP

SEQ ID NO: 7232 - protein, 9 aa, synthetic construct
  REGION 1..9: note = ATaRI peptide
IHPTKSFIR

SEQ ID NO: 7233 - protein, 43 aa, synthetic construct
  REGION 1..43: note = ATaRI peptide
DYRATFPEGIFQFIVLRNTYTYTSVGCDIVVYFWFCIYIFIKT

SEQ ID NO: 7234 - protein, 14 aa, synthetic construct
  REGION 1..14: note = ATaRI peptide
HCAVKSLNSKWHFI

SEQ ID NO: 7235 - protein, 10 aa, synthetic construct
  REGION 1..10: note = ATaRI peptide
NFIRNETHVS

SEQ ID NO: 7236 - protein, 9 aa, synthetic construct
  REGION 1..9: note = ATaRI peptide
RDLAARNCM

SEQ ID NO: 7237 - protein, 21 aa, synthetic construct
  REGION 1..21: note = ATaRI peptide
TADRELLPCKSHLSSASEGVW

SEQ ID NO: 7238 - protein, 30 aa, synthetic construct
  REGION 1..30: note = ATaRI peptide
LMGVFAKAVSVCLEGGLGEWMGKAKGIKAA

SEQ ID NO: 7239 - protein, 36 aa, synthetic construct
  REGION 1..36: note = ATaRI peptide
TSDGRMIVVSLWNFHSLLSCRFIGCKFYVKPLISNA

SEQ ID NO: 7240 - protein, 45 aa, synthetic construct
  REGION 1..45: note = ATaRI peptide
REMDLQVQSKSARLLLLFAARVQCQTCLSSLLAPSALSLSSGSLR

SEQ ID NO: 7241 - protein, 44 aa, synthetic construct
  REGION 1..44: note = ATaRI peptide
EQMASIKKVCATLWIIYQEILGPSEKDISKLNSGLDIKMREYYQ

SEQ ID NO: 7242 - protein, 10 aa, synthetic construct
  REGION 1..10: note = ATaRI peptide
GITEILERRK

SEQ ID NO: 7243 - protein, 19 aa, synthetic construct
  REGION 1..19: note = ATaRI peptide
PRYCICNQVKVCYIYKSII

SEQ ID NO: 7244 - protein, 18 aa, synthetic construct
  REGION 1..18: note = ATaRI peptide
QQCLGGRKVGSGSSGGSL

SEQ ID NO: 7245 - protein, 15 aa, synthetic construct
  REGION 1..15: note = ATaRI peptide
DGVHFLTQVSTFPLG

SEQ ID NO: 7246 - protein, 14 aa, synthetic construct
  REGION 1..14: note = ATaRI peptide
KCGCHFHEVFMLAI

SEQ ID NO: 7247 - protein, 9 aa, synthetic construct
  REGION 1..9: note = ATaRI peptide
DQRLRPRRT

SEQ ID NO: 7248 - protein, 27 aa, synthetic construct
  REGION 1..27: note = ATaRI peptide
VCIHFSATGVNLQEMASFWCQLPIYHF

SEQ ID NO: 7249 - protein, 9 aa, synthetic construct
  REGION 1..9: note = ATaRI peptide
PRGQIIYTW

SEQ ID NO: 7250 - protein, 39 aa, synthetic construct
  REGION 1..39: note = ATaRI peptide
SLGGQAVQVGIFLPPKLTQVKVLLAQWIAIAPSQVGIEI

SEQ ID NO: 7251 - protein, 39 aa, synthetic construct
  REGION 1..39: note = ATaRI peptide
SNKTGRFVVSVLKNSAIGLVAVAHACNPSTLGGRGRQIT

SEQ ID NO: 7252 - protein, 28 aa, synthetic construct
  REGION 1..28: note = ATaRI peptide
MLLDAWEQVKLHFVHKKRMHFWLGDDRT

SEQ ID NO: 7253 - protein, 54 aa, synthetic construct
  REGION 1..54: note = ATaRI peptide
TVMLSGIKVRPYSWLRGGFRVCGCSVMDSSTWGLRICCFFLMWAINIDFILVLV

SEQ ID NO: 7254 - protein, 18 aa, synthetic construct
  REGION 1..18: note = ATaRI peptide
MAQLRFKKGILRVLNPNH

SEQ ID NO: 7255 - protein, 35 aa, synthetic construct
  REGION 1..35: note = ATaRI peptide
CSLDLPGSGESPISTSLSSWDYRCLPPQLANFLYF

SEQ ID NO: 7256 - protein, 9 aa, synthetic construct
  REGION 1..9: note = ATaRI peptide
ARQARALVG

SEQ ID NO: 7257 - protein, 16 aa, synthetic construct
  REGION 1..16: note = ATaRI peptide
THITAQTAVSSFLFSF

SEQ ID NO: 7258 - protein, 9 aa, synthetic construct
  REGION 1..9: note = ATaRI peptide
EESVTGVHR

SEQ ID NO: 7259 - protein, 9 aa, synthetic construct
  REGION 1..9: note = ATaRI peptide
DPICALQAW

SEQ ID NO: 7260 - protein, 9 aa, synthetic construct
  REGION 1..9: note = ATaRI peptide
LSCDLPEER

SEQ ID NO: 7261 - protein, 14 aa, synthetic construct
  REGION 1..14: note = ATaRI peptide
RALCRITDVSYLFH

SEQ ID NO: 7262 - protein, 9 aa, synthetic construct
  REGION 1..9: note = ATaRI peptide
ENMTELLSR

SEQ ID NO: 7263 - protein, 10 aa, synthetic construct
  REGION 1..10: note = ATaRI peptide
LVYDELHKVS

SEQ ID NO: 7264 - protein, 194 aa, synthetic construct
  REGION 1..194: note = ATaRI peptide
RLSQRKDQVSSCLQPHRGSSPGHQRNPPLVIPELQKRKGSRPWTLSNRQRPPLIGSRLSPQSITEAAWQRTERGLWSREDLFIFYFIIIIFFRQGLALSPRLVSPTATSSDSCASASPVAGITGAHHHARLIFVFLLEMGFRHVGQASLELLTSSNPPASASQSAGITGVSHHAWTGVRETWLVLALTLRKSVR

SEQ ID NO: 7265 - protein, 13 aa, synthetic construct
  REGION 1..13: note = ATaRI peptide
FLALMPMKVSVIM

SEQ ID NO: 7266 - protein, 11 aa, synthetic construct
  REGION 1..11: note = ATaRI peptide
HQRPPQRQVSL

SEQ ID NO: 7267 - protein, 62 aa, synthetic construct
  REGION 1..62: note = ATaRI peptide
LKVNGSSHGKEYVDVVKVCCYTLLSSVSHYLLRTLVFELGSTRGINYFHNNRVKEACIQLYA

SEQ ID NO: 7268 - protein, 15 aa, synthetic construct
  REGION 1..15: note = ATaRI peptide
LTSTIITWVGNSSPA

SEQ ID NO: 7269 - protein, 21 aa, synthetic construct
  REGION 1..21: note = ATaRI peptide
LDTYAPFPGICLKAFMSCKQL

SEQ ID NO: 7270 - protein, 9 aa, synthetic construct
  REGION 1..9: note = ATaRI peptide
ADNVVNIAR

SEQ ID NO: 7271 - protein, 30 aa, synthetic construct
  REGION 1..30: note = ATaRI peptide
VGDFTHDQVTDFVALVIFWCILHFDYIWKF

SEQ ID NO: 7272 - protein, 32 aa, synthetic construct
  REGION 1..32: note = ATaRI peptide
QLAELCYQVHRKLRFVVLNRRNLTRCMSTPQI

SEQ ID NO: 7273 - protein, 20 aa, synthetic construct
  REGION 1..20: note = ATaRI peptide
GQRPLLMEVSSIEYVFVSNF

SEQ ID NO: 7274 - protein, 25 aa, synthetic construct
  REGION 1..25: note = ATaRI peptide
DEPDTLEAGRMRSIPNLFWIGRWLL

SEQ ID NO: 7275 - protein, 19 aa, synthetic construct
  REGION 1..19: note = ATaRI peptide
CDGHEIGRVKQLLFSIIIE

SEQ ID NO: 7276 - protein, 26 aa, synthetic construct
  REGION 1..26: note = ATaRI peptide
LYTYESKMVRLSRHLMLDQEVVFSWL

SEQ ID NO: 7277 - protein, 9 aa, synthetic construct
  REGION 1..9: note = ATaRI peptide
MRPETDPQR

SEQ ID NO: 7278 - protein, 10 aa, synthetic construct
  REGION 1..10: note = ATaRI peptide
QHLQAAGQVR

SEQ ID NO: 7279 - protein, 12 aa, synthetic construct
  REGION 1..12: note = ATaRI peptide
EIELAMQQVRTM

SEQ ID NO: 7280 - protein, 12 aa, synthetic construct
  REGION 1..12: note = ATaRI peptide
LPPDEIKEVRIL

SEQ ID NO: 7281 - protein, 46 aa, synthetic construct
  REGION 1..46: note = ATaRI peptide
VSQHDLDQVRFYSHILLFFFIKVKGLGVMVHICNPSILGGRDGRIA

SEQ ID NO: 7282 - protein, 9 aa, synthetic construct
  REGION 1..9: note = ATaRI peptide
FTGNQIQNR

SEQ ID NO: 7283 - protein, 23 aa, synthetic construct
  REGION 1..23: note = ATaRI peptide
WAQNIINLGGPLPLHTFLSGICL

SEQ ID NO: 7284 - protein, 19 aa, synthetic construct
  REGION 1..19: note = ATaRI peptide
YNLPSLPDVSRHKIYTSLC

SEQ ID NO: 7285 - protein, 14 aa, synthetic construct
  REGION 1..14: note = ATaRI peptide
SVPSPGLAGKVGFF

SEQ ID NO: 7286 - protein, 22 aa, synthetic construct
  REGION 1..22: note = ATaRI peptide
DEESRPQNVIMNACNAIPMHGG

SEQ ID NO: 7287 - protein, 45 aa, synthetic construct
  REGION 1..45: note = ATaRI peptide
FQDPVPLTVSINVIFCMFTQWNAFLEFYENLAYITIFQYFLISKP

SEQ ID NO: 7288 - protein, 36 aa, synthetic construct
  REGION 1..36: note = ATaRI peptide
TGAITLLEVMPKERCFLVYEYQTVDECLGECCLLCS

SEQ ID NO: 7289 - protein, 20 aa, synthetic construct
  REGION 1..20: note = ATaRI peptide
QAEAAGFKGKGALISDILHS

SEQ ID NO: 7290 - protein, 15 aa, synthetic construct
  REGION 1..15: note = ATaRI peptide
LYNGRAAEVLMEVCF

SEQ ID NO: 7291 - protein, 17 aa, synthetic construct
  REGION 1..17: note = ATaRI peptide
DLEPTTPQVTENVLYFY

SEQ ID NO: 7292 - protein, 28 aa, synthetic construct
  REGION 1..28: note = ATaRI peptide
LIANDCYKVSLTETKGNIKDSLSHCCIG

SEQ ID NO: 7293 - protein, 9 aa, synthetic construct
  REGION 1..9: note = ATaRI peptide
WPKGWMQAR

SEQ ID NO: 7294 - protein, 18 aa, synthetic construct
  REGION 1..18: note = ATaRI peptide
HSFPTMLKVSAMVVSISM

SEQ ID NO: 7295 - protein, 18 aa, synthetic construct
  REGION 1..18: note = ATaRI peptide
GNLTFFRQVRAVFHWLPS

SEQ ID NO: 7296 - protein, 17 aa, synthetic construct
  REGION 1..17: note = ATaRI peptide
RDQQAAEEVTYFNRTQP

SEQ ID NO: 7297 - protein, 30 aa, synthetic construct
  REGION 1..30: note = ATaRI peptide
FQACPETQVRPPCSEAGAGAGVGGPPQFSA

SEQ ID NO: 7298 - protein, 9 aa, synthetic construct
  REGION 1..9: note = ATaRI peptide
GGDGTLQEV

SEQ ID NO: 7299 - protein, 9 aa, synthetic construct
  REGION 1..9: note = ATaRI peptide
VAYQYVKKG

SEQ ID NO: 7300 - protein, 55 aa, synthetic construct
  REGION 1..55: note = ATaRI peptide
AAASAGLRVRSEHPHLPPLKTVELCHSHPLSSSSSWQCCQEYRDGLFCPFYRFYR

SEQ ID NO: 7301 - protein, 60 aa, synthetic construct
  REGION 1..60: note = ATaRI peptide
HEDQKLQEVLGRPRWGGGYRKDDKVLFASILLSCSPLPPRVGCPHHTGACTCHSCGSCPF

SEQ ID NO: 7302 - protein, 9 aa, synthetic construct
  REGION 1..9: note = ATaRI peptide
QDVRDVSAT

SEQ ID NO: 7303 - protein, 19 aa, synthetic construct
  REGION 1..19: note = ATaRI peptide
QKIEFECKVSRSHAPHPCP

SEQ ID NO: 7304 - protein, 39 aa, synthetic construct
  REGION 1..39: note = ATaRI peptide
CLLLSRPRESVTGVAGQGTRGEGDEERGGSEREREGSCS

SEQ ID NO: 7305 - protein, 10 aa, synthetic construct
  REGION 1..10: note = ATaRI peptide
ELDLLECYSE

SEQ ID NO: 7306 - protein, 22 aa, synthetic construct
  REGION 1..22: note = ATaRI peptide
NYLTNLLKVRCFIYILSIHNRI

SEQ ID NO: 7307 - protein, 13 aa, synthetic construct
  REGION 1..13: note = ATaRI peptide
KGIYEIYSVRVLF

SEQ ID NO: 7308 - protein, 14 aa, synthetic construct
  REGION 1..14: note = ATaRI peptide
LLDADKNEGEPQDS

SEQ ID NO: 7309 - protein, 12 aa, synthetic construct
  REGION 1..12: note = ATaRI peptide
LEDTLNQVVSAS

SEQ ID NO: 7310 - protein, 14 aa, synthetic construct
  REGION 1..14: note = ATaRI peptide
ASMISKLKVSFIFS

SEQ ID NO: 7311 - protein, 33 aa, synthetic construct
  REGION 1..33: note = ATaRI peptide
LTNSEPLDCEYPCVSMLCLQAEFSVANEEMTKY

SEQ ID NO: 7312 - protein, 89 aa, synthetic construct
  REGION 1..89: note = ATaRI peptide
CTFALPSEVRMGLSAIPLVLSGGWGRAAFTVEGDRPADGLPAGWLHHGEPWGQHSGKSPVQWGRSGCLKVGCLSQLYRHVSLSCKAEPN

SEQ ID NO: 7313 - protein, 9 aa, synthetic construct
  REGION 1..9: note = ATaRI peptide
IKLYLGYKK

SEQ ID NO: 7314 - protein, 13 aa, synthetic construct
  REGION 1..13: note = ATaRI peptide
KPRVPVIKVQDFT

SEQ ID NO: 7315 - protein, 64 aa, synthetic construct
  REGION 1..64: note = ATaRI peptide
EIPMDPEAGDGSRRECGVQGRAREDSRLSAHCCREAPLCVHHGARVLGGSQGPVLPESKFGGHL

SEQ ID NO: 7316 - protein, 13 aa, synthetic construct
  REGION 1..13: note = ATaRI peptide
RNFSDACFRLVDL

SEQ ID NO: 7317 - protein, 36 aa, synthetic construct
  REGION 1..36: note = ATaRI peptide
NYETLVSVGKDGREQHVWQEPGGRWKGGRSPWTRQP

SEQ ID NO: 7318 - protein, 31 aa, synthetic construct
  REGION 1..31: note = ATaRI peptide
GAWKRGSGGKGFSLGWEGPQTSYITLPQAGL

SEQ ID NO: 7319 - protein, 128 aa, synthetic construct
  REGION 1..128: note = ATaRI peptide
QPHRSHSEGRLWPWARGGMSLSVAAEADAEDCRVIVFPGLLRHRPVPPGCLSYSLPNSRPHVLKASADLPALLPSLRTLSSHETHCGVSVGHVLWELNQCHRETLVGDTLGQGLLVPVHPMAQESLLQ

SEQ ID NO: 7320 - protein, 33 aa, synthetic construct
  REGION 1..33: note = ATaRI peptide
NQGQHPGKGELGQPEAGVHPGRGLKAPCPVPLA

SEQ ID NO: 7321 - protein, 71 aa, synthetic construct
  REGION 1..71: note = ATaRI peptide
RNWTADKEGNSGCRGPGCRQGCSEDALGAAPVGSDLLLSQHGALETDLGRALLEARKPDSLQHTRVDLLAP

SEQ ID NO: 7322 - protein, 43 aa, synthetic construct
  REGION 1..43: note = ATaRI peptide
RSLLEHHPGECGTALRGRCLAGEGAWAAPGLQAHPLPFLFSTN

SEQ ID NO: 7323 - protein, 12 aa, synthetic construct
  REGION 1..12: note = ATaRI peptide
DAVESCIQVIRL

SEQ ID NO: 7324 - protein, 22 aa, synthetic construct
  REGION 1..22: note = ATaRI peptide
KHCVFREKGKTVNRIYIFTYII

SEQ ID NO: 7325 - protein, 36 aa, synthetic construct
  REGION 1..36: note = ATaRI peptide
SFKLVISQVSGPVAPTTSTHTLSHVDSPGQPCPPQP

SEQ ID NO: 7326 - protein, 19 aa, synthetic construct
  REGION 1..19: note = ATaRI peptide
PEGYNTVVGGCSGLPGTRW

SEQ ID NO: 7327 - protein, 9 aa, synthetic construct
  REGION 1..9: note = ATaRI peptide
RASKGAQAG

SEQ ID NO: 7328 - protein, 21 aa, synthetic construct
  REGION 1..21: note = ATaRI peptide
VGCVSQHQVTALSSQSQSLIS

SEQ ID NO: 7329 - protein, 9 aa, synthetic construct
  REGION 1..9: note = ATaRI peptide
ITGRELRSK

SEQ ID NO: 7330 - protein, 18 aa, synthetic construct
  REGION 1..18: note = ATaRI peptide
INKKQLQLGMYGKVCIIF

SEQ ID NO: 7331 - protein, 83 aa, synthetic construct
  REGION 1..83: note = ATaRI peptide
HQRLVHIKVCSWNSSYVSLSPFLAFVFIPVKVFELLPEGNFILIVVCSIVFLNYIFIKCSMFYKSGCLSYLACEHLAQRNMVC

SEQ ID NO: 7332 - protein, 11 aa, synthetic construct
  REGION 1..11: note = ATaRI peptide
PNLKEEFPGKP

SEQ ID NO: 7333 - protein, 21 aa, synthetic construct
  REGION 1..21: note = ATaRI peptide
DKPTYATKVNFRQVFASLSVE

SEQ ID NO: 7334 - protein, 63 aa, synthetic construct
  REGION 1..63: note = ATaRI peptide
PGLYIAVQVKPVTFVIPKAPELSSSGRNGISQGSPLEDCAVCPSFFHSLPRPHAIQDYRERVP

SEQ ID NO: 7335 - protein, 15 aa, synthetic construct
  REGION 1..15: note = ATaRI peptide
GVTHVIPVVSRIVNI

SEQ ID NO: 7336 - protein, 45 aa, synthetic construct
  REGION 1..45: note = ATaRI peptide
LETAKAIKVKTDGKPAGLGVREMVFWTLPLGAIIPAPPFLPLPFP

SEQ ID NO: 7337 - protein, 57 aa, synthetic construct
  REGION 1..57: note = ATaRI peptide
PEIFFHPEVRCFLFCVLKCGMERYCHPECRKSSSQRRACEQGGRHSVSLHPLCSLSA

SEQ ID NO: 7338 - protein, 9 aa, synthetic construct
  REGION 1..9: note = ATaRI peptide
DVRRPLYKV

SEQ ID NO: 7339 - protein, 51 aa, synthetic construct
  REGION 1..51: note = ATaRI peptide
VQVQQYIKVKFHLLRTRIFSSVLFCIYLLQISSFINLHSLDSYNSLYGAYL

SEQ ID NO: 7340 - protein, 18 aa, synthetic construct
  REGION 1..18: note = ATaRI peptide
PPCCGTAAGEYPSWFFWK

SEQ ID NO: 7341 - protein, 9 aa, synthetic construct
  REGION 1..9: note = ATaRI peptide
FHKTRSNYR

SEQ ID NO: 7342 - protein, 19 aa, synthetic construct
  REGION 1..19: note = ATaRI peptide
EDLLSGKKVRSLCPSEMKY

SEQ ID NO: 7343 - protein, 22 aa, synthetic construct
  REGION 1..22: note = ATaRI peptide
DNEDEENFRYSILPHYKCSLFN

SEQ ID NO: 7344 - protein, 14 aa, synthetic construct
  REGION 1..14: note = ATaRI peptide
EEAKTETEVGHCSY

SEQ ID NO: 7345 - protein, 24 aa, synthetic construct
  REGION 1..24: note = ATaRI peptide
QGIHPAKKVLLVASHAALETRRPV

SEQ ID NO: 7346 - protein, 9 aa, synthetic construct
  REGION 1..9: note = ATaRI peptide
LAFQQKFHR

SEQ ID NO: 7347 - protein, 9 aa, synthetic construct
  REGION 1..9: note = ATaRI peptide
KHVKGLLNR

SEQ ID NO: 7348 - protein, 25 aa, synthetic construct
  REGION 1..25: note = ATaRI peptide
LRKLQRALVSQGTFNSVLLRASVSA

SEQ ID NO: 7349 - protein, 10 aa, synthetic construct
  REGION 1..10: note = ATaRI peptide
CEYERRFQVA

SEQ ID NO: 7350 - protein, 12 aa, synthetic construct
  REGION 1..12: note = ATaRI peptide
GYRDRKQQVSLF

SEQ ID NO: 7351 - protein, 17 aa, synthetic construct
  REGION 1..17: note = ATaRI peptide
LTVGENYLGMKYKIFFT

SEQ ID NO: 7352 - protein, 49 aa, synthetic construct
  REGION 1..49: note = ATaRI peptide
DDLRKHLWVIIVKIWIGICAGLVWFSWTCFTWYTTLYNFGYVCLISEVL

SEQ ID NO: 7353 - protein, 84 aa, synthetic construct
  REGION 1..84: note = ATaRI peptide
ERRYRERKVYEARPGEKFSKCCQVKDVLSIIVGSIFRKCPKPGFQSWKRPPALCIVSFFLLIVKCVFLIPKVVCDDIRKFRRYK

SEQ ID NO: 7354 - protein, 18 aa, synthetic construct
  REGION 1..18: note = ATaRI peptide
GESTVVSGGNILLLSVDH

SEQ ID NO: 7355 - protein, 23 aa, synthetic construct
  REGION 1..23: note = ATaRI peptide
ILVAGSMLGKPCIIASCSIFIYF

SEQ ID NO: 7356 - protein, 13 aa, synthetic construct
  REGION 1..13: note = ATaRI peptide
AFEDEMKKVKIQI

SEQ ID NO: 7357 - protein, 25 aa, synthetic construct
  REGION 1..25: note = ATaRI peptide
ANLDKRLLVSVFWLKSCMYDAFLGA

SEQ ID NO: 7358 - protein, 36 aa, synthetic construct
  REGION 1..36: note = ATaRI peptide
GLFFSFTEVCANNNIFPPLSQRFLFCMTKGLDSCYQ

SEQ ID NO: 7359 - protein, 87 aa, synthetic construct
  REGION 1..87: note = ATaRI peptide
AQLQEHIKVANASLSVTLLRSLHRGGHEQCPWEHFAGRFTVIKTWIYGLKGIVILLVKTLGKYLLKTCFASQRDLLYPLAHRINSRE

SEQ ID NO: 7360 - protein, 23 aa, synthetic construct
  REGION 1..23: note = ATaRI peptide
RGKDRGRESKRHQGKRWTLFPHR

SEQ ID NO: 7361 - protein, 70 aa, synthetic construct
  REGION 1..70: note = ATaRI peptide
SRHPKLWYTYVQCLAVFIPGVKNTGSVFSRPGYTSLACHFSAVWLWASSFSSLRISFLLHKKRKIIVHAL

SEQ ID NO: 7362 - protein, 10 aa, synthetic construct
  REGION 1..10: note = ATaRI peptide
KKRMFEVTGN

SEQ ID NO: 7363 - protein, 41 aa, synthetic construct
  REGION 1..41: note = ATaRI peptide
PAVPSQLNVSHCTASALINLSNIFSQGNSLSCFMYLDFRKT

SEQ ID NO: 7364 - protein, 38 aa, synthetic construct
  REGION 1..38: note = ATaRI peptide
YHHGNLCAGEYKYIQAAFTCHYYTSIDVKVSLNHMFIN

SEQ ID NO: 7365 - protein, 9 aa, synthetic construct
  REGION 1..9: note = ATaRI peptide
PNCREGEGR

SEQ ID NO: 7366 - protein, 13 aa, synthetic construct
  REGION 1..13: note = ATaRI peptide
HVSAFLDEVLVCL

SEQ ID NO: 7367 - protein, 9 aa, synthetic construct
  REGION 1..9: note = ATaRI peptide
FCNLFINQV

SEQ ID NO: 7368 - protein, 24 aa, synthetic construct
  REGION 1..24: note = ATaRI peptide
DPSDCTNMVMLYLCIFIAWDPIIL

SEQ ID NO: 7369 - protein, 22 aa, synthetic construct
  REGION 1..22: note = ATaRI peptide
NGLEAAFKVSSEEAIIKNVYYE

SEQ ID NO: 7370 - protein, 32 aa, synthetic construct
  REGION 1..32: note = ATaRI peptide
CKIHNLVEVMAFNLSRFIDLFIEFREEQKSLT

SEQ ID NO: 7371 - protein, 14 aa, synthetic construct
  REGION 1..14: note = ATaRI peptide
EQVYIQLEVSAEVK

SEQ ID NO: 7372 - protein, 20 aa, synthetic construct
  REGION 1..20: note = ATaRI peptide
NPYTALDKVIQISNILCALK

SEQ ID NO: 7373 - protein, 57 aa, synthetic construct
  REGION 1..57: note = ATaRI peptide
FAKASSITVYYNNLSFSAPPPSIFPNLVSGVLGCMYLFTSNRVIADSVFFTLSQLHF

SEQ ID NO: 7374 - protein, 26 aa, synthetic construct
  REGION 1..26: note = ATaRI peptide
FETLEHNQVRWIFLLHIFFILFLFDK

SEQ ID NO: 7375 - protein, 53 aa, synthetic construct
  REGION 1..53: note = ATaRI peptide
SKGAQPKQVIFFLKVSYYTVLAEECHSVSIIVKCYLSCHVGQELENLQLKFVM

SEQ ID NO: 7376 - protein, 26 aa, synthetic construct
  REGION 1..26: note = ATaRI peptide
AECECVGHVRFDYEVFYARGVFSACS

SEQ ID NO: 7377 - protein, 50 aa, synthetic construct
  REGION 1..50: note = ATaRI peptide
LKDFHKKQVLHRFVILRHKGTSRCKLASFILLVIHLPSVICVQNTMLGRF

SEQ ID NO: 7378 - protein, 9 aa, synthetic construct
  REGION 1..9: note = ATaRI peptide
DAIRNRKKR

SEQ ID NO: 7379 - protein, 16 aa, synthetic construct
  REGION 1..16: note = ATaRI peptide
PENLKALFRQVLCFVA

SEQ ID NO: 7380 - protein, 9 aa, synthetic construct
  REGION 1..9: note = ATaRI peptide
NAGTGKSKV

SEQ ID NO: 7381 - protein, 9 aa, synthetic construct
  REGION 1..9: note = ATaRI peptide
NPQDLGWNP

SEQ ID NO: 7382 - protein, 18 aa, synthetic construct
  REGION 1..18: note = ATaRI peptide
IPESSLVQVCLRLRHLTF

SEQ ID NO: 7383 - protein, 30 aa, synthetic construct
  REGION 1..30: note = ATaRI peptide
ARVRLQLKVRNTCLICMLVKTCYCNSLVLF

SEQ ID NO: 7384 - protein, 32 aa, synthetic construct
  REGION 1..32: note = ATaRI peptide
IEETKGIEVCRVSLRHTHTHTHTHTHTHTHTL

SEQ ID NO: 7385 - protein, 9 aa, synthetic construct
  REGION 1..9: note = ATaRI peptide
KLKTTASQV

SEQ ID NO: 7386 - protein, 27 aa, synthetic construct
  REGION 1..27: note = ATaRI peptide
EAIRKKLVVSANYDIEKVPKRWSLPPP

SEQ ID NO: 7387 - protein, 9 aa, synthetic construct
  REGION 1..9: note = ATaRI peptide
RLVKELEAS

SEQ ID NO: 7388 - protein, 9 aa, synthetic construct
  REGION 1..9: note = ATaRI peptide
GRNTIKKGK

SEQ ID NO: 7389 - protein, 45 aa, synthetic construct
  REGION 1..45: note = ATaRI peptide
PLYQFSLKVMLNELRNMGNFRSSICFWNIGIYFIIDNNNNYYYYY

SEQ ID NO: 7390 - protein, 9 aa, synthetic construct
  REGION 1..9: note = ATaRI peptide
PSTYGLAQW

SEQ ID NO: 7391 - protein, 53 aa, synthetic construct
  REGION 1..53: note = ATaRI peptide
LTVRAEDQVTKLPSHIFLNKNVFIGFLKLMFGHMTRERVILGKNMFFTLNRVL

SEQ ID NO: 7392 - protein, 26 aa, synthetic construct
  REGION 1..26: note = ATaRI peptide
SCRYFNPKVTNFYSWFLLLSLKSLNT

SEQ ID NO: 7393 - protein, 67 aa, synthetic construct
  REGION 1..67: note = ATaRI peptide
DAQNRTRQVRAWRRTKATLSGQSGVRSQPRWLWVPLYVHFSWSHKTPAHPELEGTSKVVGANLPVSQ

SEQ ID NO: 7394 - protein, 31 aa, synthetic construct
  REGION 1..31: note = ATaRI peptide
ILKEPHFQVTFPITQLSSSLYSQSILLYFPV

SEQ ID NO: 7395 - protein, 9 aa, synthetic construct
  REGION 1..9: note = ATaRI peptide
EIAAFHLDR

SEQ ID NO: 7396 - protein, 19 aa, synthetic construct
  REGION 1..19: note = ATaRI peptide
GPLSVLKQGIASRAGVVGS

SEQ ID NO: 7397 - protein, 16 aa, synthetic construct
  REGION 1..16: note = ATaRI peptide
DEIIELKKVVFRFVLY

SEQ ID NO: 7398 - protein, 32 aa, synthetic construct
  REGION 1..32: note = ATaRI peptide
SPTISKTQGTFLKATPGGRPGNGREWQGMATG

SEQ ID NO: 7399 - protein, 164 aa, synthetic construct
  REGION 1..164: note = ATaRI peptide
LVPLQQCCRYSPCRSRLQLHPPPYCAGDRGGHSLPHPTPAITWERKGPEFNHSPEFNPHPHSAAWRRRPHPPTTPGPSSSSPLGPPLCVRPATPVTERARGQGRRQLRHRDPAPARSCRSLPLPPSAGVQTPFPPFHGWGRRLAGQTLCTSLRRHHSARVVRMC

SEQ ID NO: 7400 - protein, 9 aa, synthetic construct
  REGION 1..9: note = ATaRI peptide
LQEQLLQRE

SEQ ID NO: 7401 - protein, 43 aa, synthetic construct
  REGION 1..43: note = ATaRI peptide
RREREEVLRYVTRVRAGEDPGESALLLPLRPPVASQPCCQPAS

SEQ ID NO: 7402 - protein, 9 aa, synthetic construct
  REGION 1..9: note = ATaRI peptide
AHLARARHR

SEQ ID NO: 7403 - protein, 20 aa, synthetic construct
  REGION 1..20: note = ATaRI peptide
FQFREMKKVRNDHFLNLKKT

SEQ ID NO: 7404 - protein, 85 aa, synthetic construct
  REGION 1..85: note = ATaRI peptide
GGGSCQDSGRRVLGLRRGRALGSWGCLGLGVRTVADAGSPLPRASLLRGSSSTFFFFRQCLALVAQAGVQWCNLGSLQPPPPGFK

SEQ ID NO: 7405 - protein, 9 aa, synthetic construct
  REGION 1..9: note = ATaRI peptide
SNAPVTEYM

SEQ ID NO: 7406 - protein, 47 aa, synthetic construct
  REGION 1..47: note = ATaRI peptide
GRESPPPSVSLGAGGWMGGCSALGVRCSTASVGWCGMCSQCELWGQL

SEQ ID NO: 7407 - protein, 18 aa, synthetic construct
  REGION 1..18: note = ATaRI peptide
LNAMKKDQVKQVNFEFAF

SEQ ID NO: 7408 - protein, 21 aa, synthetic construct
  REGION 1..21: note = ATaRI peptide
INKLSDQSVSIIKFTHSKMCC

SEQ ID NO: 7409 - protein, 39 aa, synthetic construct
  REGION 1..39: note = ATaRI peptide
DVKPSPSAGKNLLDFLCRVSYIEKYLYCLLPCVRISGCS

SEQ ID NO: 7410 - protein, 9 aa, synthetic construct
  REGION 1..9: note = ATaRI peptide
GTGFCFDSR

SEQ ID NO: 7411 - protein, 29 aa, synthetic construct
  REGION 1..29: note = ATaRI peptide
QKESQGYLSKSPTFSLFFSVQYFLPLSLH

SEQ ID NO: 7412 - protein, 11 aa, synthetic construct
  REGION 1..11: note = ATaRI peptide
DSRTQKEKGKY

SEQ ID NO: 7413 - protein, 15 aa, synthetic construct
  REGION 1..15: note = ATaRI peptide
ENTDDNITGKNKSKV

SEQ ID NO: 7414 - protein, 19 aa, synthetic construct
  REGION 1..19: note = ATaRI peptide
MDLVGNIKVSILVCLCGNF

SEQ ID NO: 7415 - protein, 71 aa, synthetic construct
  REGION 1..71: note = ATaRI peptide
PRSGLIRVRYCSGYSYKLVNDLGIALKMKACCFEAILLHNPDYEFIFVFSKNHVLHLESLNVISRMTGSFE

SEQ ID NO: 7416 - protein, 10 aa, synthetic construct
  REGION 1..10: note = ATaRI peptide
DGAHNYQEGM

SEQ ID NO: 7417 - protein, 19 aa, synthetic construct
  REGION 1..19: note = ATaRI peptide
FSQISILKVTLYPSIDVFG

SEQ ID NO: 7418 - protein, 13 aa, synthetic construct
  REGION 1..13: note = ATaRI peptide
LVLHFRHKVWYLI

SEQ ID NO: 7419 - protein, 18 aa, synthetic construct
  REGION 1..18: note = ATaRI peptide
MPLAIFTKVKCNIFYRIP

SEQ ID NO: 7420 - protein, 42 aa, synthetic construct
  REGION 1..42: note = ATaRI peptide
LLAATLQLGKKPHGAYSYLFYYNFSFCNIYEILDCTINTYSL

SEQ ID NO: 7421 - protein, 15 aa, synthetic construct
  REGION 1..15: note = ATaRI peptide
LGSGKRLVVRPFFNI

SEQ ID NO: 7422 - protein, 24 aa, synthetic construct
  REGION 1..24: note = ATaRI peptide
SPNFDSVSVGVLADFKGVYKSGKL

SEQ ID NO: 7423 - protein, 21 aa, synthetic construct
  REGION 1..21: note = ATaRI peptide
LVPSVTVKVLYQILDCNVQTI

SEQ ID NO: 7424 - protein, 31 aa, synthetic construct
  REGION 1..31: note = ATaRI peptide
DQFTFEFMSKFFVLAESLPWCEFFKNTSLFI

SEQ ID NO: 7425 - protein, 15 aa, synthetic construct
  REGION 1..15: note = ATaRI peptide
QYPWGVAEGKIFFSE

SEQ ID NO: 7426 - protein, 9 aa, synthetic construct
  REGION 1..9: note = ATaRI peptide
LTTYSSEYK

SEQ ID NO: 7427 - protein, 122 aa, synthetic construct
  REGION 1..122: note = ATaRI peptide
KPSSQLQKVPSSAKPGLSLHLIYTYFSPNQGHLKISFANIPGSILYFCPIFKSLPFISKCPGFRFTFRLGMDSCQEGNESLGCWEERRGERQQMGISVLCPSNPFATVLSSAKFVQSSLLVD

SEQ ID NO: 7428 - protein, 18 aa, synthetic construct
  REGION 1..18: note = ATaRI peptide
YSSYFDIFVSIFYVSFQM

SEQ ID NO: 7429 - protein, 17 aa, synthetic construct
  REGION 1..17: note = ATaRI peptide
PQEAEEENSKFLSKSAS

SEQ ID NO: 7430 - protein, 40 aa, synthetic construct
  REGION 1..40: note = ATaRI peptide
KTRANVDKVTRDSLLLHHVKIGWFALTWLHFVWRVYETFK

SEQ ID NO: 7431 - protein, 10 aa, synthetic construct
  REGION 1..10: note = ATaRI peptide
YIVELSENSK

SEQ ID NO: 7432 - protein, 19 aa, synthetic construct
  REGION 1..19: note = ATaRI peptide
CSNILLNNRYGYELYIYLK

SEQ ID NO: 7433 - protein, 21 aa, synthetic construct
  REGION 1..21: note = ATaRI peptide
GVLRGYILRQVPCDWPSLGRH

SEQ ID NO: 7434 - protein, 37 aa, synthetic construct
  REGION 1..37: note = ATaRI peptide
CGLAARSQVPSEIRSGWLKGSLPQLASSGALRRAIRV

SEQ ID NO: 7435 - protein, 44 aa, synthetic construct
  REGION 1..44: note = ATaRI peptide
VTEYTLQGGKLVSKTTRWRDLCRGMGFARFDWSTLERKTENPVP

SEQ ID NO: 7436 - protein, 17 aa, synthetic construct
  REGION 1..17: note = ATaRI peptide
EVIKVERPGKAITPFKK

SEQ ID NO: 7437 - protein, 52 aa, synthetic construct
  REGION 1..52: note = ATaRI peptide
HIIYCSITGISTPHPCQLKGFPVSVFSYCYKKPFAGFFFFWKLFCFPFSKAV

SEQ ID NO: 7438 - protein, 19 aa, synthetic construct
  REGION 1..19: note = ATaRI peptide
DCNLLSSQVTIQLTFQIML

SEQ ID NO: 7439 - protein, 35 aa, synthetic construct
  REGION 1..35: note = ATaRI peptide
QQFATVCKVIYNYWDWSMILYKARESSVLPRSQPT

SEQ ID NO: 7440 - protein, 9 aa, synthetic construct
  REGION 1..9: note = ATaRI peptide
ELIKILSER

SEQ ID NO: 7441 - protein, 11 aa, synthetic construct
  REGION 1..11: note = ATaRI peptide
KNVFAEPQVCF

SEQ ID NO: 7442 - protein, 17 aa, synthetic construct
  REGION 1..17: note = ATaRI peptide
QLVWTQEDSEYSFLRVS

SEQ ID NO: 7443 - protein, 10 aa, synthetic construct
  REGION 1..10: note = ATaRI peptide
LEKNGIITGK

SEQ ID NO: 7444 - protein, 28 aa, synthetic construct
  REGION 1..28: note = ATaRI peptide
SRWIVEGQVRVSLDWELAFAKSSVGACE

SEQ ID NO: 7445 - protein, 10 aa, synthetic construct
  REGION 1..10: note = ATaRI peptide
EATACVVDRY

SEQ ID NO: 7446 - protein, 95 aa, synthetic construct
  REGION 1..95: note = ATaRI peptide
TSTMCELTRKCALSGRPMPRGAHTVPRASWSLSARENQPGLMAPVLESPLKRCVSTYQTTREIGKEASRNRGWGNLLISGLQVWDREESQIEQDL

SEQ ID NO: 7447 - protein, 35 aa, synthetic construct
  REGION 1..35: note = ATaRI peptide
YEPLAPVQGKTRGWGDGSAGHTSAQPSAVYTVSRT

SEQ ID NO: 7448 - protein, 93 aa, synthetic construct
  REGION 1..93: note = ATaRI peptide
SADASESEVSVGAYFRAVTISPYFCSETSAPSGCLVLFESHNIPTGRAKDKGLHYADEKRAEIQPHGLLWAPQSSHSLEQSRHSKADSWRSRL

SEQ ID NO: 7449 - protein, 27 aa, synthetic construct
  REGION 1..27: note = ATaRI peptide
LNLIGFVSRWLTMSLCFIIHGKPSEAD

SEQ ID NO: 7450 - protein, 14 aa, synthetic construct
  REGION 1..14: note = ATaRI peptide
GVKRTYSEVSVQVT

SEQ ID NO: 7451 - protein, 59 aa, synthetic construct
  REGION 1..59: note = ATaRI peptide
NSLHSSPSGKSVHSWDSGVTRPGWAWGNHRTPESPVGAWGTGDGCHIPKKRAGCGGSHL

SEQ ID NO: 7452 - protein, 38 aa, synthetic construct
  REGION 1..38: note = ATaRI peptide
EAPEPALDVSTRPHAGECVGARARGGVSVPGAFWKGRQ

SEQ ID NO: 7453 - protein, 13 aa, synthetic construct
  REGION 1..13: note = ATaRI peptide
LHFIDNAKVTLSS

SEQ ID NO: 7454 - protein, 55 aa, synthetic construct
  REGION 1..55: note = ATaRI peptide
DSRKFLLLGEWALERGWLVQTWLGEADPSWECAHGPLSGCSRGSIRDGRFEPEMA

SEQ ID NO: 7455 - protein, 69 aa, synthetic construct
  REGION 1..69: note = ATaRI peptide
LPLLLLLCGKGATARTGGAPTPRGSPDPGGPAPSRTCAAVLPLPRSSGGAHSDPGGIPRLCGRVPPGRS

SEQ ID NO: 7456 - protein, 9 aa, synthetic construct
  REGION 1..9: note = ATaRI peptide
WCNLSEFIV

SEQ ID NO: 7457 - protein, 22 aa, synthetic construct
  REGION 1..22: note = ATaRI peptide
RTADKGWQVKPSPQGRIASEGP

SEQ ID NO: 7458 - protein, 87 aa, synthetic construct
  REGION 1..87: note = ATaRI peptide
AESLLHQARYGGAAAPALLPASLPRGTRGWVSQGRGLGASLAGTRLDSPSRLGDRVRQHGGQAWGEEVGEGHGGSPEEVTLEQSLGE

SEQ ID NO: 7459 - protein, 56 aa, synthetic construct
  REGION 1..56: note = ATaRI peptide
EGPGTLDTGVRGGGMTSDRGGRWAHYGLVAGGHGRRWGDSGVPRMQQRSGLSNAAC

SEQ ID NO: 7460 - protein, 55 aa, synthetic construct
  REGION 1..55: note = ATaRI peptide
MCSACGLQGKRHLMGLGVPSSLHFCSPGAPRWGPSSWGTPIPISGFCFRCPQVTF

SEQ ID NO: 7461 - protein, 9 aa, synthetic construct
  REGION 1..9: note = ATaRI peptide
HKNICSLAT

SEQ ID NO: 7462 - protein, 19 aa, synthetic construct
  REGION 1..19: note = ATaRI peptide
VPSSPTRLGKGRDANLEGN

SEQ ID NO: 7463 - protein, 100 aa, synthetic construct
  REGION 1..100: note = ATaRI peptide
TQGVMTGESEYLQTPRGGGAGLPWALEASSQGLPMMLPGLGGRLTIPGQTELGTVITIFPGLAGGRKGVHSHMGGTCGPTHVCAVFLGCVILCDRGSLCL

SEQ ID NO: 7464 - protein, 54 aa, synthetic construct
  REGION 1..54: note = ATaRI peptide
GPRESDCLVRCPSSSLPGAGWGCTRPTHTRTEDFLWGSCQLAFVITDRILPSAW

SEQ ID NO: 7465 - protein, 39 aa, synthetic construct
  REGION 1..39: note = ATaRI peptide
RRLLQEREVSASPGWAQEPSHPDRNKGQPRERAISSCVC

SEQ ID NO: 7466 - protein, 13 aa, synthetic construct
  REGION 1..13: note = ATaRI peptide
EYHAEGGKVRRWL

SEQ ID NO: 7467 - protein, 10 aa, synthetic construct
  REGION 1..10: note = ATaRI peptide
DVYMIMVKCE

SEQ ID NO: 7468 - protein, 25 aa, synthetic construct
  REGION 1..25: note = ATaRI peptide
LPFHQDGKVSRRPGRRGAGGGARRW

SEQ ID NO: 7469 - protein, 10 aa, synthetic construct
  REGION 1..10: note = ATaRI peptide
MANPESIASK

SEQ ID NO: 7470 - protein, 9 aa, synthetic construct
  REGION 1..9: note = ATaRI peptide
CESQECVTK

SEQ ID NO: 7471 - protein, 37 aa, synthetic construct
  REGION 1..37: note = ATaRI peptide
HMLMQAYKVSASAVTAVPCVGSQVSLSGFGSCFGKAI

SEQ ID NO: 7472 - protein, 13 aa, synthetic construct
  REGION 1..13: note = ATaRI peptide
ELRSYQLRVSTEI

SEQ ID NO: 7473 - protein, 30 aa, synthetic construct
  REGION 1..30: note = ATaRI peptide
LYMVHHLWGICFSLFELLGFKSSLLSCTGK

SEQ ID NO: 7474 - protein, 37 aa, synthetic construct
  REGION 1..37: note = ATaRI peptide
WEELVYYTGNLLTAMKYAFCLTVSIMFFHPDTNRWVL

SEQ ID NO: 7475 - protein, 9 aa, synthetic construct
  REGION 1..9: note = ATaRI peptide
LGPKGTMKM

SEQ ID NO: 7476 - protein, 9 aa, synthetic construct
  REGION 1..9: note = ATaRI peptide
NHRARVTTR

SEQ ID NO: 7477 - protein, 37 aa, synthetic construct
  REGION 1..37: note = ATaRI peptide
ALRAARRTGMRRGRRAGGRRRCSPGRWPCGSAHLEGH

SEQ ID NO: 7478 - protein, 25 aa, synthetic construct
  REGION 1..25: note = ATaRI peptide
RLEKFFHRVSILNFIYNFSKHSAGF

SEQ ID NO: 7479 - protein, 9 aa, synthetic construct
  REGION 1..9: note = ATaRI peptide
FLYNDQLIW

SEQ ID NO: 7480 - protein, 9 aa, synthetic construct
  REGION 1..9: note = ATaRI peptide
PGNLQHYGR

SEQ ID NO: 7481 - protein, 31 aa, synthetic construct
  REGION 1..31: note = ATaRI peptide
FLRINFILVRIEMGKHYNNLLTSSYSSFLSR

SEQ ID NO: 7482 - protein, 11 aa, synthetic construct
  REGION 1..11: note = ATaRI peptide
MFVINEMRRKY

SEQ ID NO: 7483 - protein, 15 aa, synthetic construct
  REGION 1..15: note = ATaRI peptide
FGGYLRSRGKLLLIS

SEQ ID NO: 7484 - protein, 21 aa, synthetic construct
  REGION 1..21: note = ATaRI peptide
LDITLEIKVNFIIMGVITFLK

SEQ ID NO: 7485 - protein, 31 aa, synthetic construct
  REGION 1..31: note = ATaRI peptide
QAYVLFYIRYCHENKLPDFLVCHFFLSYQHV

SEQ ID NO: 7486 - protein, 24 aa, synthetic construct
  REGION 1..24: note = ATaRI peptide
QLPSHMIKVTVLREKNIFMLIFKM

SEQ ID NO: 7487 - protein, 9 aa, synthetic construct
  REGION 1..9: note = ATaRI peptide
LKGSTDEMR

SEQ ID NO: 7488 - protein, 31 aa, synthetic construct
  REGION 1..31: note = ATaRI peptide
KTKNSLVMVSCFPVCFLIVCGGAEGTQAEEF

SEQ ID NO: 7489 - protein, 42 aa, synthetic construct
  REGION 1..42: note = ATaRI peptide
NYRNLVFLGENNFSTHFLIYPKGFIFFFFWVECLLVIYALHK

SEQ ID NO: 7490 - protein, 39 aa, synthetic construct
  REGION 1..39: note = ATaRI peptide
GLPGSLEMVRVPGPRSRERGRAWLELVGSGCGETPASLQ

SEQ ID NO: 7491 - protein, 16 aa, synthetic construct
  REGION 1..16: note = ATaRI peptide
FYILQLLLGKYLSIQK

SEQ ID NO: 7492 - protein, 19 aa, synthetic construct
  REGION 1..19: note = ATaRI peptide
DFLKEKPQVLCLLFPPDVY

SEQ ID NO: 7493 - protein, 43 aa, synthetic construct
  REGION 1..43: note = ATaRI peptide
DIVTGVYTGERGWNFAVCADSFSELLSNFGLHCALCRPGTWCL

SEQ ID NO: 7494 - protein, 12 aa, synthetic construct
  REGION 1..12: note = ATaRI peptide
AYASHFNKVGLY

SEQ ID NO: 7495 - protein, 28 aa, synthetic construct
  REGION 1..28: note = ATaRI peptide
ELHHRDTEVYRLCVHLSRLSSSAWRSRA

SEQ ID NO: 7496 - protein, 19 aa, synthetic construct
  REGION 1..19: note = ATaRI peptide
DFSCKSLQVCCLHSSWLYK

SEQ ID NO: 7497 - protein, 68 aa, synthetic construct
  REGION 1..68: note = ATaRI peptide
CLLIAHRKVRITQTWNLLFPDPAVLSFSSLFIFLLRCYRDDLRACYLSQNKNKKALNSVCWAHKLFSM

SEQ ID NO: 7498 - protein, 12 aa, synthetic construct
  REGION 1..12: note = ATaRI peptide
NPDFIEVKVSPC

SEQ ID NO: 7499 - protein, 14 aa, synthetic construct
  REGION 1..14: note = ATaRI peptide
SLKALAVKVRIMTS

SEQ ID NO: 7500 - protein, 9 aa, synthetic construct
  REGION 1..9: note = ATaRI peptide
LDGQENKRR

SEQ ID NO: 7501 - protein, 9 aa, synthetic construct
  REGION 1..9: note = ATaRI peptide
PGTFDGCIR

SEQ ID NO: 7502 - protein, 18 aa, synthetic construct
  REGION 1..18: note = ATaRI peptide
FASLFSVLVSIRSSPHLG

SEQ ID NO: 7503 - protein, 20 aa, synthetic construct
  REGION 1..20: note = ATaRI peptide
LNDEVPEVRYVGRRPRALSS

SEQ ID NO: 7504 - protein, 30 aa, synthetic construct
  REGION 1..30: note = ATaRI peptide
WMAPEMINGEWFSPAHHGPHGKPWGSPGEL

SEQ ID NO: 7505 - protein, 42 aa, synthetic construct
  REGION 1..42: note = ATaRI peptide
LLKAQHEQVSGRWGWGQSFSSQPHRVSPTQSGDPGGGGCREI

SEQ ID NO: 7506 - protein, 51 aa, synthetic construct
  REGION 1..51: note = ATaRI peptide
LVSALDSMVSVPTHPRGGDRVSVPTCLVAQVLPQLLEGAFTDLNLSLSDCS

SEQ ID NO: 7507 - protein, 37 aa, synthetic construct
  REGION 1..37: note = ATaRI peptide
QSDFLRFCREYPRAPEGRARHFPRAGALAHLWVPNPV

SEQ ID NO: 7508 - protein, 92 aa, synthetic construct
  REGION 1..92: note = ATaRI peptide
EEVFDVLYSKILPHSIWGPQGGWEPRSPPSRGGPLLSHYGPWAKPDPKAWGYWLPQPFLISAFPDTEVLLQPFSKPPPLLSLPWLKSLPPLA

SEQ ID NO: 7509 - protein, 61 aa, synthetic construct
  REGION 1..61: note = ATaRI peptide
AQDFSDCCGNIAAGISKSRGWDRGHSCRGQPPRAGQDAWALLGWKEPCLGMGVGLDRWCPG

SEQ ID NO: 7510 - protein, 53 aa, synthetic construct
  REGION 1..53: note = ATaRI peptide
FSIVHDKSGRTAPTKHPGLSGNLRLEVVLIEMEVYLLGLCERKEEQLCSRGCK

SEQ ID NO: 7511 - protein, 23 aa, synthetic construct
  REGION 1..23: note = ATaRI peptide
QILFNSRYGEWAARPAVWPQQPC

SEQ ID NO: 7512 - protein, 17 aa, synthetic construct
  REGION 1..17: note = ATaRI peptide
MFDERIFTGMWGPSSPF

SEQ ID NO: 7513 - protein, 9 aa, synthetic construct
  REGION 1..9: note = ATaRI peptide
VLDLAGNAR

SEQ ID NO: 7514 - protein, 109 aa, synthetic construct
  REGION 1..109: note = ATaRI peptide
GYGMEMLTGKKWTWAGGAWDSALQGAKGKGWARPSPGVSWCQPSVVEETQYMPDPNPRLGSFWKPQVGSIYLFRDGVSLLLPRLECSGTISAHRNLCLPGSSDSPASAS

SEQ ID NO: 7515 - protein, 60 aa, synthetic construct
  REGION 1..60: note = ATaRI peptide
RPEERPVEGEALSTPDILHPPPPHLSSPAAHLPLASGSLRSLHLISLQHPGVGVGILWAA

SEQ ID NO: 7516 - protein, 126 aa, synthetic construct
  REGION 1..126: note = ATaRI peptide
ELLFNTRYGEQEVGQGLGASRPPSSRPVCRRALVASPCLFPSQLFSGQGQGREGREELGPIMRMGTLERLSLRLPGSLTHTLPQSQVGEATPSPVMSPALSPPPSPSSLRPHPHPGSSRRLIIRIR

SEQ ID NO: 7517 - protein, 9 aa, synthetic construct
  REGION 1..9: note = ATaRI peptide
NSIQFVIKR

SEQ ID NO: 7518 - protein, 24 aa, synthetic construct
  REGION 1..24: note = ATaRI peptide
SLKRQGFQGKVELTGRSVVPAPGH

SEQ ID NO: 7519 - protein, 9 aa, synthetic construct
  REGION 1..9: note = ATaRI peptide
RMVIINQLQ

SEQ ID NO: 7520 - protein, 75 aa, synthetic construct
  REGION 1..75: note = ATaRI peptide
NGFVKPKLGELGAGVCAGETSRSYQAQPQTSLTLSTGFCPLSMNGVPGRTGCKGPSVVAHACNPSTLGGRGRQFT

SEQ ID NO: 7521 - protein, 20 aa, synthetic construct
  REGION 1..20: note = ATaRI peptide
EEAAVVQSVSGRIPVVVAEL

SEQ ID NO: 7522 - protein, 12 aa, synthetic construct
  REGION 1..12: note = ATaRI peptide
NEGASSEKGIRL

SEQ ID NO: 7523 - protein, 10 aa, synthetic construct
  REGION 1..10: note = ATaRI peptide
TGSYDGVLVS

SEQ ID NO: 7524 - protein, 18 aa, synthetic construct
  REGION 1..18: note = ATaRI peptide
CKFLSDTQVKTDLIPHLK

SEQ ID NO: 7525 - protein, 30 aa, synthetic construct
  REGION 1..30: note = ATaRI peptide
PSSKPLAQVSTLFWRKSNCNMLMFNLISYY

SEQ ID NO: 7526 - protein, 9 aa, synthetic construct
  REGION 1..9: note = ATaRI peptide
AGHMLSWFR

SEQ ID NO: 7527 - protein, 17 aa, synthetic construct
  REGION 1..17: note = ATaRI peptide
GATGLRDKVRLTVVAAA

SEQ ID NO: 7528 - protein, 24 aa, synthetic construct
  REGION 1..24: note = ATaRI peptide
SASRNRRHGMSQNGQEAVHCPLLS

SEQ ID NO: 7529 - protein, 35 aa, synthetic construct
  REGION 1..35: note = ATaRI peptide
ELKVPPDEVCVLGPWLPLFLFGNNSTWKGHPPHLA

SEQ ID NO: 7530 - protein, 25 aa, synthetic construct
  REGION 1..25: note = ATaRI peptide
WPCTATAIRCPHWPRAEAGGPPPQS

SEQ ID NO: 7531 - protein, 71 aa, synthetic construct
  REGION 1..71: note = ATaRI peptide
YSIPHGIQVRGLLESPTPGHSSSHPAHIPAVCPWIKAEDAHVAKLRPPGPLRPEPWRAGNGEAVPGLRVSS

SEQ ID NO: 7532 - protein, 67 aa, synthetic construct
  REGION 1..67: note = ATaRI peptide
PDNAQGRKVSATMRPGGGRGPDQAAGGQAPHWTLLLQRRTEAEAGPSVCCSFLGTCCRYREGSLDLT

SEQ ID NO: 7533 - protein, 35 aa, synthetic construct
  REGION 1..35: note = ATaRI peptide
PLPGPGPYRWVVPTGALGLGLCLGRTHCWDQGCSL

SEQ ID NO: 7534 - protein, 11 aa, synthetic construct
  REGION 1..11: note = ATaRI peptide
DLAVLQIQVGE

SEQ ID NO: 7535 - protein, 49 aa, synthetic construct
  REGION 1..49: note = ATaRI peptide
DTLLLAKKVGLRPCLFPSAPAPLLPFIFHRPTDLLREALERLGFMTRGT

SEQ ID NO: 7536 - protein, 35 aa, synthetic construct
  REGION 1..35: note = ATaRI peptide
LAIAEKSQVGFGSCIAFLKGASRGCIQATHSYPTV

SEQ ID NO: 7537 - protein, 27 aa, synthetic construct
  REGION 1..27: note = ATaRI peptide
TLRNGPSKVRVIFKIVCLCDFILANVK

SEQ ID NO: 7538 - protein, 12 aa, synthetic construct
  REGION 1..12: note = ATaRI peptide
LSLRSYLKVEWE

SEQ ID NO: 7539 - protein, 18 aa, synthetic construct
  REGION 1..18: note = ATaRI peptide
TSILLTEQVSVPTYYATN

SEQ ID NO: 7540 - protein, 31 aa, synthetic construct
  REGION 1..31: note = ATaRI peptide
RAIQDAILGETPTAWPSFRCLLSAPATGICS

SEQ ID NO: 7541 - protein, 17 aa, synthetic construct
  REGION 1..17: note = ATaRI peptide
GKLREKSEVFIFDLTLF

SEQ ID NO: 7542 - protein, 9 aa, synthetic construct
  REGION 1..9: note = ATaRI peptide
EQTKQKTIR

SEQ ID NO: 7543 - protein, 15 aa, synthetic construct
  REGION 1..15: note = ATaRI peptide
SFFTALRMVGELADI

SEQ ID NO: 7544 - protein, 27 aa, synthetic construct
  REGION 1..27: note = ATaRI peptide
LMKDTCNTGTVTTTGSVFLSPLKPPAP

SEQ ID NO: 7545 - protein, 14 aa, synthetic construct
  REGION 1..14: note = ATaRI peptide
SLKKYLESGMLIIF

SEQ ID NO: 7546 - protein, 10 aa, synthetic construct
  REGION 1..10: note = ATaRI peptide
SIMNYFRTGK

SEQ ID NO: 7547 - protein, 22 aa, synthetic construct
  REGION 1..22: note = ATaRI peptide
GVFGCNCDVSKLLKFFSFDLLG

SEQ ID NO: 7548 - protein, 9 aa, synthetic construct
  REGION 1..9: note = ATaRI peptide
LAYYRLHGQ

SEQ ID NO: 7549 - protein, 9 aa, synthetic construct
  REGION 1..9: note = ATaRI peptide
FFYHIRDDR

SEQ ID NO: 7550 - protein, 9 aa, synthetic construct
  REGION 1..9: note = ATaRI peptide
FVKVEDMSQ

SEQ ID NO: 7551 - protein, 43 aa, synthetic construct
  REGION 1..43: note = ATaRI peptide
RGDLGGPQVRGSVREVVLRASRPTRDPTIALGCPGDPMSSWVK

SEQ ID NO: 7552 - protein, 13 aa, synthetic construct
  REGION 1..13: note = ATaRI peptide
QKTIYQIQVMQYL

SEQ ID NO: 7553 - protein, 9 aa, synthetic construct
  REGION 1..9: note = ATaRI peptide
ALSTCHGLQ

SEQ ID NO: 7554 - protein, 13 aa, synthetic construct
  REGION 1..13: note = ATaRI peptide
FSLDDLPSGMMFI

SEQ ID NO: 7555 - protein, 164 aa, synthetic construct
  REGION 1..164: note = ATaRI peptide
RPKRSKRQVCIHSGVSCYFKTIVNCQSFESTVSLCERVSISLGICQGVINRKGDGSEEAVERGPCCFTDAKRIQDSGDNMFLHHIMGYEAPACGTLGSFYHRLLSLPRYVPHRGIHLYGLYPCIYSLEDNPLGMNQSGCEATECFCLTWAKLWSPGYKIRSWTL

SEQ ID NO: 7556 - protein, 20 aa, synthetic construct
  REGION 1..20: note = ATaRI peptide
MIVNDHLMVGFAVVFKPVCA

SEQ ID NO: 7557 - protein, 26 aa, synthetic construct
  REGION 1..26: note = ATaRI peptide
SVVNMADLVSINPVHYCPRRFLFPNC

SEQ ID NO: 7558 - protein, 9 aa, synthetic construct
  REGION 1..9: note = ATaRI peptide
SGCIMGDTG

SEQ ID NO: 7559 - protein, 24 aa, synthetic construct
  REGION 1..24: note = ATaRI peptide
CLFNKPSKVISVVNKVYNINYQPF

SEQ ID NO: 7560 - protein, 12 aa, synthetic construct
  REGION 1..12: note = ATaRI peptide
GLCCKKCKVNKH

SEQ ID NO: 7561 - protein, 9 aa, synthetic construct
  REGION 1..9: note = ATaRI peptide
DTWIQCNKR

SEQ ID NO: 7562 - protein, 9 aa, synthetic construct
  REGION 1..9: note = ATaRI peptide
QQGRTLNCR

SEQ ID NO: 7563 - protein, 45 aa, synthetic construct
  REGION 1..45: note = ATaRI peptide
GTICSGNGVSIQYLVRIYFFYITEIDRTLNYLFFLIMEKNDFSYF

SEQ ID NO: 7564 - protein, 14 aa, synthetic construct
  REGION 1..14: note = ATaRI peptide
TGITLSGNGKYLIW

SEQ ID NO: 7565 - protein, 15 aa, synthetic construct
  REGION 1..15: note = ATaRI peptide
MKRNYREQRYVIQIM

SEQ ID NO: 7566 - protein, 17 aa, synthetic construct
  REGION 1..17: note = ATaRI peptide
QNISLFCSRFDYFFLLS

SEQ ID NO: 7567 - protein, 13 aa, synthetic construct
  REGION 1..13: note = ATaRI peptide
KNTEGPYFRYFIN

SEQ ID NO: 7568 - protein, 26 aa, synthetic construct
  REGION 1..26: note = ATaRI peptide
KVNRQSARVCGNLFHVRTCSVIIIYL

SEQ ID NO: 7569 - protein, 22 aa, synthetic construct
  REGION 1..22: note = ATaRI peptide
GPKDASRQVCILHFYSYVSGIL

SEQ ID NO: 7570 - protein, 26 aa, synthetic construct
  REGION 1..26: note = ATaRI peptide
FLNMAYQQVLNVLVIYLMLVKYFLLV

SEQ ID NO: 7571 - protein, 25 aa, synthetic construct
  REGION 1..25: note = ATaRI peptide
WREFSFIQVCGVLFGEGLCRIGFPC

SEQ ID NO: 7572 - protein, 39 aa, synthetic construct
  REGION 1..39: note = ATaRI peptide
FLEWCESEGEWPFKILVKILIFIFQLNAQYMHRNNNEVN

SEQ ID NO: 7573 - protein, 11 aa, synthetic construct
  REGION 1..11: note = ATaRI peptide
KGTIQQMIGKI

SEQ ID NO: 7574 - protein, 15 aa, synthetic construct
  REGION 1..15: note = ATaRI peptide
IHRYLDFKVSIFLIT

SEQ ID NO: 7575 - protein, 20 aa, synthetic construct
  REGION 1..20: note = ATaRI peptide
TSNAKTLKVGFLMYYSIHNK

SEQ ID NO: 7576 - protein, 19 aa, synthetic construct
  REGION 1..19: note = ATaRI peptide
IAVACCSERSVRVPSAWSP

SEQ ID NO: 7577 - protein, 21 aa, synthetic construct
  REGION 1..21: note = ATaRI peptide
KPAIADYACKCNLIVHFNEWR

SEQ ID NO: 7578 - protein, 32 aa, synthetic construct
  REGION 1..32: note = ATaRI peptide
IMYSDFKQVGIFKVKHYIRSQKYLVLVRTWIL

SEQ ID NO: 7579 - protein, 20 aa, synthetic construct
  REGION 1..20: note = ATaRI peptide
ETIILLTKVGFLFYCVLYLV

SEQ ID NO: 7580 - protein, 143 aa, synthetic construct
  REGION 1..143: note = ATaRI peptide
PRLWELTDSEYDKSTTSSPSRHIILFWHLYVTCMQRFTYLCVHKHKIMYVCMCITGVCVCVCVYVWREREREREQGKGGHVYIYLVESCHSFASLPDTGRKWIPFLLSLLCSLQLCIFVFDYVCVQKNDLNSHKGKGKYDLHI

SEQ ID NO: 7581 - protein, 33 aa, synthetic construct
  REGION 1..33: note = ATaRI peptide
YGTEGLQQVCLFSVAFDLLLTKTKTGNVNNSSL

SEQ ID NO: 7582 - protein, 15 aa, synthetic construct
  REGION 1..15: note = ATaRI peptide
QTMKTQETGKMVSDL

SEQ ID NO: 7583 - protein, 32 aa, synthetic construct
  REGION 1..32: note = ATaRI peptide
EECSYFLQVKCLKVLLWPDVVADTYNPSTLGG

SEQ ID NO: 7584 - protein, 12 aa, synthetic construct
  REGION 1..12: note = ATaRI peptide
KNIDGTIEVLYF

SEQ ID NO: 7585 - protein, 33 aa, synthetic construct
  REGION 1..33: note = ATaRI peptide
RNSSTQTQVVWTLPHLGAMDHQFSRICLSLLLV

SEQ ID NO: 7586 - protein, 12 aa, synthetic construct
  REGION 1..12: note = ATaRI peptide
YGTQTRKTVYEN

SEQ ID NO: 7587 - protein, 30 aa, synthetic construct
  REGION 1..30: note = ATaRI peptide
SLPTPPYSVSIKNIHLVKHYNEKLNFECLY

SEQ ID NO: 7588 - protein, 16 aa, synthetic construct
  REGION 1..16: note = ATaRI peptide
AVELSKAEGEQFAIDN

SEQ ID NO: 7589 - protein, 19 aa, synthetic construct
  REGION 1..19: note = ATaRI peptide
ISEHQTREVRTSLILPNLQ

SEQ ID NO: 7590 - protein, 30 aa, synthetic construct
  REGION 1..30: note = ATaRI peptide
DSEHVTLKVGDISHLNITAGSMFLPSFISH

SEQ ID NO: 7591 - protein, 9 aa, synthetic construct
  REGION 1..9: note = ATaRI peptide
VRVSIAISR

SEQ ID NO: 7592 - protein, 14 aa, synthetic construct
  REGION 1..14: note = ATaRI peptide
SGMKACVEVNFFFF

SEQ ID NO: 7593 - protein, 28 aa, synthetic construct
  REGION 1..28: note = ATaRI peptide
PGDLDTSLVWFGIHCTSHSFVYSLLTFK

SEQ ID NO: 7594 - protein, 9 aa, synthetic construct
  REGION 1..9: note = ATaRI peptide
ATGAGAASR

SEQ ID NO: 7595 - protein, 32 aa, synthetic construct
  REGION 1..32: note = ATaRI peptide
FDPASYIIGKFDKWHRFFFNLVNSPILCKRVC

SEQ ID NO: 7596 - protein, 9 aa, synthetic construct
  REGION 1..9: note = ATaRI peptide
KFMNLQSAR

SEQ ID NO: 7597 - protein, 19 aa, synthetic construct
  REGION 1..19: note = ATaRI peptide
NEDTASASGRKIFLFYFKN

SEQ ID NO: 7598 - protein, 12 aa, synthetic construct
  REGION 1..12: note = ATaRI peptide
NFSILQLHVSVS

SEQ ID NO: 7599 - protein, 15 aa, synthetic construct
  REGION 1..15: note = ATaRI peptide
EDVLASNGVCGVCET

SEQ ID NO: 7600 - protein, 9 aa, synthetic construct
  REGION 1..9: note = ATaRI peptide
QTGDGPVKR

SEQ ID NO: 7601 - protein, 9 aa, synthetic construct
  REGION 1..9: note = ATaRI peptide
ERVVATESL

SEQ ID NO: 7602 - protein, 103 aa, synthetic construct
  REGION 1..103: note = ATaRI peptide
HLASRRYRGERALPSARAGRGGGGDAAAGGRPHRPTHAHAAFRRPGPRGRRFPQVSPAAAGARGQLSGPQWGPPKDNGWWFWAPRAARAGVGGANPGPGQKCC

SEQ ID NO: 7603 - protein, 11 aa, synthetic construct
  REGION 1..11: note = ATaRI peptide
KLSHKFKEVCH

SEQ ID NO: 7604 - protein, 9 aa, synthetic construct
  REGION 1..9: note = ATaRI peptide
KLIKDFQQK

SEQ ID NO: 7605 - protein, 71 aa, synthetic construct
  REGION 1..71: note = ATaRI peptide
SCQDGLSQGLFNPTTKIIFDDCVIWPFIFLFLTQRFKSWKYLPTMGKKKRLIKIGVNHFSSRLIKNKYFNM

SEQ ID NO: 7606 - protein, 42 aa, synthetic construct
  REGION 1..42: note = ATaRI peptide
GEDSLERKVSTLDRFLICTVGVYHCSYSLLKIMIFLQTESMS

SEQ ID NO: 7607 - protein, 15 aa, synthetic construct
  REGION 1..15: note = ATaRI peptide
NKKILREKGIVNFFF

SEQ ID NO: 7608 - protein, 31 aa, synthetic construct
  REGION 1..31: note = ATaRI peptide
ASRFSAGSRYGCVIKNTCISIPKLSGPLFYC

SEQ ID NO: 7609 - protein, 19 aa, synthetic construct
  REGION 1..19: note = ATaRI peptide
IGNGWFGKVRCSSLAFVFL

SEQ ID NO: 7610 - protein, 21 aa, synthetic construct
  REGION 1..21: note = ATaRI peptide
GIGFSRYKVSQRFKCFQSDLI

SEQ ID NO: 7611 - protein, 55 aa, synthetic construct
  REGION 1..55: note = ATaRI peptide
DQTKYSNIWYVLAYRFISHFFGKVLTSSSLSTSLKESSCIRCRNKRVSDGVKKTV

SEQ ID NO: 7612 - protein, 23 aa, synthetic construct
  REGION 1..23: note = ATaRI peptide
LEQPYSDRWLVASHSACSVSSSL

SEQ ID NO: 7613 - protein, 36 aa, synthetic construct
  REGION 1..36: note = ATaRI peptide
TDSDIEQGGERRCVLGIGSAGSGVGRCSWEMVVLQA

SEQ ID NO: 7614 - protein, 45 aa, synthetic construct
  REGION 1..45: note = ATaRI peptide
HIHYYHLQVGVVANCLERINNFISYLNAPEGWAVAHACNPSTLGG

SEQ ID NO: 7615 - protein, 10 aa, synthetic construct
  REGION 1..10: note = ATaRI peptide
FLQEKPAQVM

SEQ ID NO: 7616 - protein, 13 aa, synthetic construct
  REGION 1..13: note = ATaRI peptide
SVMFRFLEVSFEN

SEQ ID NO: 7617 - protein, 15 aa, synthetic construct
  REGION 1..15: note = ATaRI peptide
FRPPITQEVSCLKSL

SEQ ID NO: 7618 - protein, 16 aa, synthetic construct
  REGION 1..16: note = ATaRI peptide
YKELPKVVVCFYFGFN

SEQ ID NO: 7619 - protein, 21 aa, synthetic construct
  REGION 1..21: note = ATaRI peptide
REDSETRTVSVSLSYFYPWLL

SEQ ID NO: 7620 - protein, 9 aa, synthetic construct
  REGION 1..9: note = ATaRI peptide
AIQVSAQAR

SEQ ID NO: 7621 - protein, 20 aa, synthetic construct
  REGION 1..20: note = ATaRI peptide
AYIIRIYQVRSLTFMSGLLR

SEQ ID NO: 7622 - protein, 36 aa, synthetic construct
  REGION 1..36: note = ATaRI peptide
GYTARETLRYEIKPVISGWLNARSISYWHFMLQVFQ

SEQ ID NO: 7623 - protein, 23 aa, synthetic construct
  REGION 1..23: note = ATaRI peptide
PLLPNLLQGQSSDFGCLLVLCVM

SEQ ID NO: 7624 - protein, 29 aa, synthetic construct
  REGION 1..29: note = ATaRI peptide
SLQLPMEKVSSVTMSFRFKPCEDTMFQSM

SEQ ID NO: 7625 - protein, 44 aa, synthetic construct
  REGION 1..44: note = ATaRI peptide
MVAVAQQCGEHGGTVGHGIGSLTFIGALKTCSGHFVVLEKAEFG

SEQ ID NO: 7626 - protein, 17 aa, synthetic construct
  REGION 1..17: note = ATaRI peptide
VIMEPHKEVRFLSPEPR

SEQ ID NO: 7627 - protein, 17 aa, synthetic construct
  REGION 1..17: note = ATaRI peptide
VPLRIAALSKLMKIYGV

SEQ ID NO: 7628 - protein, 34 aa, synthetic construct
  REGION 1..34: note = ATaRI peptide
GGQRSDGNVSDLFVSGKGTSRHAGSVLMPGQCFH

SEQ ID NO: 7629 - protein, 44 aa, synthetic construct
  REGION 1..44: note = ATaRI peptide
IHKKIVLQVFCKPLLSADISVNLTWCTWLPGAVSASPVVFSQNQ

SEQ ID NO: 7630 - protein, 50 aa, synthetic construct
  REGION 1..50: note = ATaRI peptide
HLIVQHFKVCRRDGGLRGARLQAFTLNLYLVLFCNNQVVVHLLVRLLLVH

SEQ ID NO: 7631 - protein, 16 aa, synthetic construct
  REGION 1..16: note = ATaRI peptide
FLIRVACQVRDPSALR

SEQ ID NO: 7632 - protein, 64 aa, synthetic construct
  REGION 1..64: note = ATaRI peptide
NANPSQLFGECVSVLVFVVAQFGLFPRSLDVLPFGKGLRLLGRALSRCVVQVSVAWGPQGRRLL

SEQ ID NO: 7633 - protein, 36 aa, synthetic construct
  REGION 1..36: note = ATaRI peptide
SGSTEATSGDVLATGGLSSDSVEQRTDSVVQAGAEL

SEQ ID NO: 7634 - protein, 35 aa, synthetic construct
  REGION 1..35: note = ATaRI peptide
NSPMAANQVSWDGVPCDLPFNKRKFKPQHLGLSET

SEQ ID NO: 7635 - protein, 39 aa, synthetic construct
  REGION 1..39: note = ATaRI peptide
FWIKQCIEVGRLGSHLWPGAAVGFLSWGSKARRCSHTLR

SEQ ID NO: 7636 - protein, 35 aa, synthetic construct
  REGION 1..35: note = ATaRI peptide
ENSESKEEVRPCTPQAESQRGGEAPHPTGRIPERR

SEQ ID NO: 7637 - protein, 53 aa, synthetic construct
  REGION 1..53: note = ATaRI peptide
AMKEALVQVRRPGGIPAAAWVPFPEAAGVSWEISLRTSILAVERQLLGRKGSF

SEQ ID NO: 7638 - protein, 41 aa, synthetic construct
  REGION 1..41: note = ATaRI peptide
HVHTPLLQVRAVPPCEHRPVACRSQAPVSRLRSADCSGQQR

SEQ ID NO: 7639 - protein, 37 aa, synthetic construct
  REGION 1..37: note = ATaRI peptide
RGTQASHQVAVGPGRGPSCRLQPSCVGQCLETGVFRR

SEQ ID NO: 7640 - protein, 30 aa, synthetic construct
  REGION 1..30: note = ATaRI peptide
RKKEEERKGKGWAAHAGTGPNSGPGPATKH

SEQ ID NO: 7641 - protein, 17 aa, synthetic construct
  REGION 1..17: note = ATaRI peptide
NYGSITSMGKDYFICMD

SEQ ID NO: 7642 - protein, 18 aa, synthetic construct
  REGION 1..18: note = ATaRI peptide
HFREKSQRCTCEEFISGG

SEQ ID NO: 7643 - protein, 23 aa, synthetic construct
  REGION 1..23: note = ATaRI peptide
GFFTAGSQVSSDSLCRNHDRCFD

SEQ ID NO: 7644 - protein, 22 aa, synthetic construct
  REGION 1..22: note = ATaRI peptide
FKPCKETQVSTLSVCFIKNFFN

SEQ ID NO: 7645 - protein, 16 aa, synthetic construct
  REGION 1..16: note = ATaRI peptide
EKIDGDIKVYSNTNFP

SEQ ID NO: 7646 - protein, 90 aa, synthetic construct
  REGION 1..90: note = ATaRI peptide
NSCLHVGKVGFFDIFVGGSRRGLLLFIKGQSQFNWSSLCVMSSRRIGEFVQLAGNYRLGTITFFTVSLLGNQNETVFSFEVLHLGLIYCL

SEQ ID NO: 7647 - protein, 32 aa, synthetic construct
  REGION 1..32: note = ATaRI peptide
ELEPGNVKGKKYYRILLHLQQDPLIKTICRYL

SEQ ID NO: 7648 - protein, 39 aa, synthetic construct
  REGION 1..39: note = ATaRI peptide
EPDNDLAKVSIECDFSPNSVVGCFCIYFKVVSILPNKLC

SEQ ID NO: 7649 - protein, 9 aa, synthetic construct
  REGION 1..9: note = ATaRI peptide
SGCIQDCNR

SEQ ID NO: 7650 - protein, 9 aa, synthetic construct
  REGION 1..9: note = ATaRI peptide
QLANDSVNR

SEQ ID NO: 7651 - protein, 46 aa, synthetic construct
  REGION 1..46: note = ATaRI peptide
SHRQQGITGGGCLHSFLLKVTLSCVCTFTVKQRDKSINSRIRPRFK

SEQ ID NO: 7652 - protein, 14 aa, synthetic construct
  REGION 1..14: note = ATaRI peptide
ALAHKGLKVRKSSF

SEQ ID NO: 7653 - protein, 15 aa, synthetic construct
  REGION 1..15: note = ATaRI peptide
RRKIEIQEVFVFDYL

SEQ ID NO: 7654 - protein, 10 aa, synthetic construct
  REGION 1..10: note = ATaRI peptide
NISEIIAKVR

SEQ ID NO: 7655 - protein, 9 aa, synthetic construct
  REGION 1..9: note = ATaRI peptide
LQNLERKNA

SEQ ID NO: 7656 - protein, 9 aa, synthetic construct
  REGION 1..9: note = ATaRI peptide
VTLLVVVPK

SEQ ID NO: 7657 - protein, 37 aa, synthetic construct
  REGION 1..37: note = ATaRI peptide
YHIPCPYQVKAITWIMSLFTFNVENVSWKYTCHGCKS

SEQ ID NO: 7658 - protein, 9 aa, synthetic construct
  REGION 1..9: note = ATaRI peptide
SESARSEGR

SEQ ID NO: 7659 - protein, 13 aa, synthetic construct
  REGION 1..13: note = ATaRI peptide
SRAVVTGQVVSFF

SEQ ID NO: 7660 - protein, 14 aa, synthetic construct
  REGION 1..14: note = ATaRI peptide
RTLCRRLQVPPSVV

SEQ ID NO: 7661 - protein, 9 aa, synthetic construct
  REGION 1..9: note = ATaRI peptide
VIKDSDGQV

SEQ ID NO: 7662 - protein, 9 aa, synthetic construct
  REGION 1..9: note = ATaRI peptide
SYTILPQRR

SEQ ID NO: 7663 - protein, 11 aa, synthetic construct
  REGION 1..11: note = ATaRI peptide
YGRDDLALVGI

SEQ ID NO: 7664 - protein, 9 aa, synthetic construct
  REGION 1..9: note = ATaRI peptide
GMRFEAMER

SEQ ID NO: 7665 - protein, 43 aa, synthetic construct
  REGION 1..43: note = ATaRI peptide
LYCQQYAEVSVFRTMAYNFILVTIRCYYGTKNISLMLSKYINI

SEQ ID NO: 7666 - protein, 10 aa, synthetic construct
  REGION 1..10: note = ATaRI peptide
RALFGLYMVS

SEQ ID NO: 7667 - protein, 10 aa, synthetic construct
  REGION 1..10: note = ATaRI peptide
PTIRKTQKVC

SEQ ID NO: 7668 - protein, 32 aa, synthetic construct
  REGION 1..32: note = ATaRI peptide
DLPFIHQSVSMLMVLGKGFVVFLFSLKQRNKI

SEQ ID NO: 7669 - protein, 19 aa, synthetic construct
  REGION 1..19: note = ATaRI peptide
LNIASSIEVSILEAKSNET

SEQ ID NO: 7670 - protein, 10 aa, synthetic construct
  REGION 1..10: note = ATaRI peptide
PRIHLDTICE

SEQ ID NO: 7671 - protein, 9 aa, synthetic construct
  REGION 1..9: note = ATaRI peptide
RRIHKSIER

SEQ ID NO: 7672 - protein, 131 aa, synthetic construct
  REGION 1..131: note = ATaRI peptide
DQRYFSGLGMTHGKGVSPQSCFMEKSVLWESEDLRATLVVPVLLVLRCHLLNLLSFTSLVFRLRALDQAVFNLSLCFRIHTLTVLSVVSPLPAALEHHLLKGGVMSPAPLYPPLHSAAPARRRCLTCVCRN

SEQ ID NO: 7673 - protein, 37 aa, synthetic construct
  REGION 1..37: note = ATaRI peptide
PVLCNPKSGECPKGGPAPKTVGTWAGPWEAESEIAGD

SEQ ID NO: 7674 - protein, 10 aa, synthetic construct
  REGION 1..10: note = ATaRI peptide
PYARKTFTVG

SEQ ID NO: 7675 - protein, 16 aa, synthetic construct
  REGION 1..16: note = ATaRI peptide
KDKNILPKVIVFNFFV

SEQ ID NO: 7676 - protein, 29 aa, synthetic construct
  REGION 1..29: note = ATaRI peptide
QISSLCSKVLRVSWGFFVCLFLYLPFKDV

SEQ ID NO: 7677 - protein, 22 aa, synthetic construct
  REGION 1..22: note = ATaRI peptide
RQSVGIQKVSEGVHLGLLCFSG

SEQ ID NO: 7678 - protein, 94 aa, synthetic construct
  REGION 1..94: note = ATaRI peptide
RKLLRVLQRYVLYIAAMCMRPVTNNCNVIKSPVYKILFCQFDYPYVICWFNFKNVHAHILHVNISLCCVLENRTLSVNLKEHPSTLGGQGGQIS

SEQ ID NO: 7679 - protein, 12 aa, synthetic construct
  REGION 1..12: note = ATaRI peptide
LDDEIGRKVYYS

SEQ ID NO: 7680 - protein, 11 aa, synthetic construct
  REGION 1..11: note = ATaRI peptide
TQSQKTQKVKI

SEQ ID NO: 7681 - protein, 67 aa, synthetic construct
  REGION 1..67: note = ATaRI peptide
MVEEEAKKVKNSVINFLISSIDFFFFFKRQSLTLLYSLEIQTRGLKQSACISLPKCWDYRRQPLYPA

SEQ ID NO: 7682 - protein, 101 aa, synthetic construct
  REGION 1..101: note = ATaRI peptide
KLPANVRQVRPEPGTGPLTDSARPAVTCLPRSRGPSGLLPADSLPLLLRGLGETDLQPRARRGRLWGHRARTGRSLNGMAWCPQDSTGAFARRIHSARHLR

SEQ ID NO: 7683 - protein, 30 aa, synthetic construct
  REGION 1..30: note = ATaRI peptide
LPNFTAADCKYLIVLKKVMFRLCLCASCHL

SEQ ID NO: 7684 - protein, 14 aa, synthetic construct
  REGION 1..14: note = ATaRI peptide
YITEDDIKVEIFKS

SEQ ID NO: 7685 - protein, 9 aa, synthetic construct
  REGION 1..9: note = ATaRI peptide
AHGLCRKER

SEQ ID NO: 7686 - protein, 9 aa, synthetic construct
  REGION 1..9: note = ATaRI peptide
RTSHCTWPL

SEQ ID NO: 7687 - protein, 9 aa, synthetic construct
  REGION 1..9: note = ATaRI peptide
RDVVRHRSG

SEQ ID NO: 7688 - protein, 31 aa, synthetic construct
  REGION 1..31: note = ATaRI peptide
LQVLGTNSVSKTILLLNVCLISISRINYFLE

SEQ ID NO: 7689 - protein, 20 aa, synthetic construct
  REGION 1..20: note = ATaRI peptide
HSDPEIRTEYVLFYFMIYSK

SEQ ID NO: 7690 - protein, 29 aa, synthetic construct
  REGION 1..29: note = ATaRI peptide
MLLRSLLMVRHLRQIKDTLNLKLLKTLIE

SEQ ID NO: 7691 - protein, 15 aa, synthetic construct
  REGION 1..15: note = ATaRI peptide
QDTSFMKKVRHLLKK

SEQ ID NO: 7692 - protein, 22 aa, synthetic construct
  REGION 1..22: note = ATaRI peptide
EHIFRDKCMYVNSLHFKDGVLT

SEQ ID NO: 7693 - protein, 14 aa, synthetic construct
  REGION 1..14: note = ATaRI peptide
DLIEKEVDGNLRKN

SEQ ID NO: 7694 - protein, 16 aa, synthetic construct
  REGION 1..16: note = ATaRI peptide
GSMRDKAKVILIIENG

SEQ ID NO: 7695 - protein, 17 aa, synthetic construct
  REGION 1..17: note = ATaRI peptide
FELKCDFKVIHLEKRLS

SEQ ID NO: 7696 - protein, 61 aa, synthetic construct
  REGION 1..61: note = ATaRI peptide
GDHQFYKQVRAVGFGCACVCSIHYPFLYLNTFQNKCSQVYQLFQKVCFSMVPFDHVALPLF

SEQ ID NO: 7697 - protein, 71 aa, synthetic construct
  REGION 1..71: note = ATaRI peptide
VQDGQEAPRCSKLCWGEGTVWLVGGQKAQRVGFPSLVPTGARRGVQSEVDLERGKLGGVLGLLLLTGAENP

SEQ ID NO: 7698 - protein, 16 aa, synthetic construct
  REGION 1..16: note = ATaRI peptide
EKDGITVVVRRAPRGP

SEQ ID NO: 7699 - protein, 87 aa, synthetic construct
  REGION 1..87: note = ATaRI peptide
RRGEPAAAGAQNWRGGGRRGPESRPFPAPPRGAFRAPPSYVSFGPDAGRETEARACVPPPLSSVEVLPGHSCEPGNADSQSLDHPHR

SEQ ID NO: 7700 - protein, 61 aa, synthetic construct
  REGION 1..61: note = ATaRI peptide
VLRCFTVLGEWWAQLCPWASVDTHRVTACCMWRMVVAGVLVGDEEAPVSTSPGPTCGSRGL

SEQ ID NO: 7701 - protein, 67 aa, synthetic construct
  REGION 1..67: note = ATaRI peptide
FLEHLRVSVSTWVPGPGAAACVTHDPECELPSWLPLAAAPAQATVLFLETWIEGLSGPGVVRDGCSE

SEQ ID NO: 7702 - protein, 25 aa, synthetic construct
  REGION 1..25: note = ATaRI peptide
HTCHSVGQVPAGSSAAGRQAGTVWG

SEQ ID NO: 7703 - protein, 65 aa, synthetic construct
  REGION 1..65: note = ATaRI peptide
RGGVLQEKVGEGGARGVLQEKVGEGAVGRAGQEWGSGSWRGGTAGENSEAGPGLSWTTLPSPPRV

SEQ ID NO: 7704 - protein, 65 aa, synthetic construct
  REGION 1..65: note = ATaRI peptide
ATRNLEPCRYLGPHFPPPVLIRKHRHACARAWWGRTADLNHGECGSDFASRELAPHPGAGLSCQW

SEQ ID NO: 7705 - protein, 43 aa, synthetic construct
  REGION 1..43: note = ATaRI peptide
RIRPFFDSVGWLGQGEGRGPQPFLPLTLSFSPSPTLLPVSHLG

SEQ ID NO: 7706 - protein, 46 aa, synthetic construct
  REGION 1..46: note = ATaRI peptide
DALICWSPVRAARGRGARGDREGAGPRRTAREGCGEGPCRTSAYAR

SEQ ID NO: 7707 - protein, 18 aa, synthetic construct
  REGION 1..18: note = ATaRI peptide
LNWCVVMLVSGTWCRERV

SEQ ID NO: 7708 - protein, 53 aa, synthetic construct
  REGION 1..53: note = ATaRI peptide
VAKASLCTGEYKAPTGRVLCCQCGLASGQLCRSLLLQWEVCMFSSSQQGQISY

SEQ ID NO: 7709 - protein, 11 aa, synthetic construct
  REGION 1..11: note = ATaRI peptide
EAPRTSKTGEA

SEQ ID NO: 7710 - protein, 20 aa, synthetic construct
  REGION 1..20: note = ATaRI peptide
DEEKRAMLVRILYSSFRWLL

SEQ ID NO: 7711 - protein, 11 aa, synthetic construct
  REGION 1..11: note = ATaRI peptide
QYFIKFWTVSH

SEQ ID NO: 7712 - protein, 27 aa, synthetic construct
  REGION 1..27: note = ATaRI peptide
VSKNKSTLGEYPIIVVDRTLNTYTNIH

SEQ ID NO: 7713 - protein, 9 aa, synthetic construct
  REGION 1..9: note = ATaRI peptide
AGLNSTAKK

SEQ ID NO: 7714 - protein, 23 aa, synthetic construct
  REGION 1..23: note = ATaRI peptide
INPGKCKAGKGVLVWLFFDIFYF

SEQ ID NO: 7715 - protein, 39 aa, synthetic construct
  REGION 1..39: note = ATaRI peptide
QDKFILYKSTIIFPLLFYIFNSLLILLGQIVSINIFNNL

SEQ ID NO: 7716 - protein, 9 aa, synthetic construct
  REGION 1..9: note = ATaRI peptide
NNLTININM

SEQ ID NO: 7717 - protein, 72 aa, synthetic construct
  REGION 1..72: note = ATaRI peptide
PTVDASIPVGIVSYLYFVPLKHSFNPHTFITCLCVPDNKLDTKYEKMNSHFSIQVTGNQQIIILNMELLILV

SEQ ID NO: 7718 - protein, 9 aa, synthetic construct
  REGION 1..9: note = ATaRI peptide
AFPELSELR

SEQ ID NO: 7719 - protein, 18 aa, synthetic construct
  REGION 1..18: note = ATaRI peptide
QRQHELSEVRLFIFFPLP

SEQ ID NO: 7720 - protein, 20 aa, synthetic construct
  REGION 1..20: note = ATaRI peptide
SSFMEKRTVCNTRQLRTSIG

SEQ ID NO: 7721 - protein, 40 aa, synthetic construct
  REGION 1..40: note = ATaRI peptide
VCLILLLAGKKTSYESLQNEPHYLSQENRLLLNLGPEFPR

SEQ ID NO: 7722 - protein, 9 aa, synthetic construct
  REGION 1..9: note = ATaRI peptide
LKNISASAR

SEQ ID NO: 7723 - protein, 71 aa, synthetic construct
  REGION 1..71: note = ATaRI peptide
GSLCALSTRYIASPLGHGLFGTLQSSQCLKICFCLFKKYPNRNKILCNFVFIDWLAQNFHIKILKDKLPCC

SEQ ID NO: 7724 - protein, 19 aa, synthetic construct
  REGION 1..19: note = ATaRI peptide
TLTAGVISGKLYKLRFLEH

SEQ ID NO: 7725 - protein, 9 aa, synthetic construct
  REGION 1..9: note = ATaRI peptide
VAACVLILR

SEQ ID NO: 7726 - protein, 24 aa, synthetic construct
  REGION 1..24: note = ATaRI peptide
VSFLVGFLGKSSSLLTLYRPRRCV

SEQ ID NO: 7727 - protein, 24 aa, synthetic construct
  REGION 1..24: note = ATaRI peptide
AIAVMDDSGMSQSENILFVRKTHT

SEQ ID NO: 7728 - protein, 10 aa, synthetic construct
  REGION 1..10: note = ATaRI peptide
HNQLRDSQVT

SEQ ID NO: 7729 - protein, 22 aa, synthetic construct
  REGION 1..22: note = ATaRI peptide
QTACPDLQVIMKFISNCLKKDV

SEQ ID NO: 7730 - protein, 10 aa, synthetic construct
  REGION 1..10: note = ATaRI peptide
SSIGAEKPRY

SEQ ID NO: 7731 - protein, 27 aa, synthetic construct
  REGION 1..27: note = ATaRI peptide
RNACNEAPGNNLRSFGVHFLLIFSHWS

SEQ ID NO: 7732 - protein, 14 aa, synthetic construct
  REGION 1..14: note = ATaRI peptide
EPFATDDLGKQNCL

SEQ ID NO: 7733 - protein, 15 aa, synthetic construct
  REGION 1..15: note = ATaRI peptide
GTTVNNLEGIYFCFR

SEQ ID NO: 7734 - protein, 16 aa, synthetic construct
  REGION 1..16: note = ATaRI peptide
VIQSCAKEVNNVHFDF

SEQ ID NO: 7735 - protein, 43 aa, synthetic construct
  REGION 1..43: note = ATaRI peptide
NSETLKEPGKSYQFKSCHIEKSLNLHTTIVFYFLNMLLLTWEI

SEQ ID NO: 7736 - protein, 14 aa, synthetic construct
  REGION 1..14: note = ATaRI peptide
TLEEEKIRVSPYCL

SEQ ID NO: 7737 - protein, 9 aa, synthetic construct
  REGION 1..9: note = ATaRI peptide
GAYPQKPLR

SEQ ID NO: 7738 - protein, 9 aa, synthetic construct
  REGION 1..9: note = ATaRI peptide
STRQTLTSR

SEQ ID NO: 7739 - protein, 14 aa, synthetic construct
  REGION 1..14: note = ATaRI peptide
DKQTQFLRSKNNGV

SEQ ID NO: 7740 - protein, 18 aa, synthetic construct
  REGION 1..18: note = ATaRI peptide
YSLEFLDKGKKAHVIGAV

SEQ ID NO: 7741 - protein, 65 aa, synthetic construct
  REGION 1..65: note = ATaRI peptide
LTDMIIYQVEYYTYFRYLCLYSMAMVANQLSYAECVMFPLGLVHCLLTPVLFSVAEGVWSIFLSK

SEQ ID NO: 7742 - protein, 51 aa, synthetic construct
  REGION 1..51: note = ATaRI peptide
HFALGEYRVSTAHIHACRRCTGPPGLSPFPSVAFHSVHVYFNLIFLPRFIT

SEQ ID NO: 7743 - protein, 28 aa, synthetic construct
  REGION 1..28: note = ATaRI peptide
FCFGSITLCKYVCTGSHVKNIYFLLSCL

SEQ ID NO: 7744 - protein, 56 aa, synthetic construct
  REGION 1..56: note = ATaRI peptide
HLMLACFKVSLKLISLKKNVISNIILMTRELENLAKDCYFSTFEGRPKQLEKHMGY

SEQ ID NO: 7745 - protein, 58 aa, synthetic construct
  REGION 1..58: note = ATaRI peptide
QPSIQTADRYQVESTPAHSVLFVNMFAAHGSQLFVPQCSFSCFLSFLICSAFWQTIWL

SEQ ID NO: 7746 - protein, 27 aa, synthetic construct
  REGION 1..27: note = ATaRI peptide
KVFTFLPEVRTIPLFLLCSHKPCAGHS

SEQ ID NO: 7747 - protein, 16 aa, synthetic construct
  REGION 1..16: note = ATaRI peptide
AIVFAAMGVSRIFVLV

SEQ ID NO: 7748 - protein, 9 aa, synthetic construct
  REGION 1..9: note = ATaRI peptide
FLNLANDPT

SEQ ID NO: 7749 - protein, 17 aa, synthetic construct
  REGION 1..17: note = ATaRI peptide
FERNFIAQGKMTVGLQT

SEQ ID NO: 7750 - protein, 12 aa, synthetic construct
  REGION 1..12: note = ATaRI peptide
QLLLERGSVRKI

SEQ ID NO: 7751 - protein, 15 aa, synthetic construct
  REGION 1..15: note = ATaRI peptide
TDVTRFLQVQCIYLM

SEQ ID NO: 7752 - protein, 11 aa, synthetic construct
  REGION 1..11: note = ATaRI peptide
LSCNLLKQVSM

SEQ ID NO: 7753 - protein, 37 aa, synthetic construct
  REGION 1..37: note = ATaRI peptide
KRILENPQVSLSENLHMYRISVWPAVMSQKEIHPKAQ

SEQ ID NO: 7754 - protein, 9 aa, synthetic construct
  REGION 1..9: note = ATaRI peptide
LESVHIILR

SEQ ID NO: 7755 - protein, 9 aa, synthetic construct
  REGION 1..9: note = ATaRI peptide
AMDGELVCR

SEQ ID NO: 7756 - protein, 15 aa, synthetic construct
  REGION 1..15: note = ATaRI peptide
SFNEQEAKVSESFTQ

SEQ ID NO: 7757 - protein, 19 aa, synthetic construct
  REGION 1..19: note = ATaRI peptide
RKSSIKAAGKPGANGPSVS

SEQ ID NO: 7758 - protein, 9 aa, synthetic construct
  REGION 1..9: note = ATaRI peptide
LPGHLGTVG

SEQ ID NO: 7759 - protein, 83 aa, synthetic construct
  REGION 1..83: note = ATaRI peptide
LGRYCGSGVRPPPLALLAPCPTPHTVLHPSQPSLQDLAPTQAPEVECSTRVALCGSPEAQPCWGYSETLPHPRRRKPSPFWAT

SEQ ID NO: 7760 - protein, 15 aa, synthetic construct
  REGION 1..15: note = ATaRI peptide
TSPSGESRRYPTARF

SEQ ID NO: 7761 - protein, 9 aa, synthetic construct
  REGION 1..9: note = ATaRI peptide
NTSQIHWTP

SEQ ID NO: 7762 - protein, 65 aa, synthetic construct
  REGION 1..65: note = ATaRI peptide
HGAAGPAAVRGGLGPGPRGRAGAALGGPGPGPVLCTAHCAQPSVWPREGIQCVFRRRRRKIRRLG

SEQ ID NO: 7763 - protein, 21 aa, synthetic construct
  REGION 1..21: note = ATaRI peptide
LVAVELLKVGTQKGVSGCHLV

SEQ ID NO: 7764 - protein, 9 aa, synthetic construct
  REGION 1..9: note = ATaRI peptide
LLATFSEFQ

SEQ ID NO: 7765 - protein, 32 aa, synthetic construct
  REGION 1..32: note = ATaRI peptide
GIFPCLASGKAPPVGPALARIPVEREDPWFPG

SEQ ID NO: 7766 - protein, 9 aa, synthetic construct
  REGION 1..9: note = ATaRI peptide
TAKIDHGNR

SEQ ID NO: 7767 - protein, 27 aa, synthetic construct
  REGION 1..27: note = ATaRI peptide
NNLQAVFTVSPPFCLIILFVCDMSIFT

SEQ ID NO: 7768 - protein, 17 aa, synthetic construct
  REGION 1..17: note = ATaRI peptide
LRRPFGVAGTRETQRQM

SEQ ID NO: 7769 - protein, 20 aa, synthetic construct
  REGION 1..20: note = ATaRI peptide
KEVNHKGQGTVQCQSWEGLC

SEQ ID NO: 7770 - protein, 14 aa, synthetic construct
  REGION 1..14: note = ATaRI peptide
PCWYETVKVRMSHL

SEQ ID NO: 7771 - protein, 11 aa, synthetic construct
  REGION 1..11: note = ATaRI peptide
FRHRSSQESKY

SEQ ID NO: 7772 - protein, 15 aa, synthetic construct
  REGION 1..15: note = ATaRI peptide
RHDLVVYKVVLTENG

SEQ ID NO: 7773 - protein, 22 aa, synthetic construct
  REGION 1..22: note = ATaRI peptide
LEEAVKIKVSLAASWVTLLRLW

SEQ ID NO: 7774 - protein, 9 aa, synthetic construct
  REGION 1..9: note = ATaRI peptide
LVFDPVELR

SEQ ID NO: 7775 - protein, 9 aa, synthetic construct
  REGION 1..9: note = ATaRI peptide
AKRNKIVKK

SEQ ID NO: 7776 - protein, 104 aa, synthetic construct
  REGION 1..104: note = ATaRI peptide
SGNGNFHMVRSGRPRNISKWTYSQIITHFFLYREAVTLIMQVHVDLKVHFTFHFIKQLEIESDSATQSLEKIFLLHVFPKATPVCRKLKEVNFMHFNPSCFSIA

SEQ ID NO: 7777 - protein, 9 aa, synthetic construct
  REGION 1..9: note = ATaRI peptide
QYKVLLEKL

SEQ ID NO: 7778 - protein, 15 aa, synthetic construct
  REGION 1..15: note = ATaRI peptide
MSCTVNVLVCDMPPV

SEQ ID NO: 7779 - protein, 9 aa, synthetic construct
  REGION 1..9: note = ATaRI peptide
KKREDIYIR

SEQ ID NO: 7780 - protein, 16 aa, synthetic construct
  REGION 1..16: note = ATaRI peptide
ISYFDKGKVSIGLFLY

SEQ ID NO: 7781 - protein, 18 aa, synthetic construct
  REGION 1..18: note = ATaRI peptide
YEGLGNLLVSLGQNMLGL

SEQ ID NO: 7782 - protein, 56 aa, synthetic construct
  REGION 1..56: note = ATaRI peptide
DIKSSPKQCILSGGSMAPRLLWLCTAPAKPENIGATVPSLQTHHLLKHSDTGSHSM

SEQ ID NO: 7783 - protein, 18 aa, synthetic construct
  REGION 1..18: note = ATaRI peptide
KDPDNEFAVSSPLLSFKR

SEQ ID NO: 7784 - protein, 30 aa, synthetic construct
  REGION 1..30: note = ATaRI peptide
FEVKQISTVSHLKLAFRKKLSVSKYNNSLC

SEQ ID NO: 7785 - protein, 12 aa, synthetic construct
  REGION 1..12: note = ATaRI peptide
KHYGVITLVSMI

SEQ ID NO: 7786 - protein, 9 aa, synthetic construct
  REGION 1..9: note = ATaRI peptide
APSRPGSDG

SEQ ID NO: 7787 - protein, 37 aa, synthetic construct
  REGION 1..37: note = ATaRI peptide
KMCLESLQVRRELNFLKQMNKNAFCFKVIPLKCHISC

SEQ ID NO: 7788 - protein, 15 aa, synthetic construct
  REGION 1..15: note = ATaRI peptide
RALPKKSQVSMCLKI

SEQ ID NO: 7789 - protein, 15 aa, synthetic construct
  REGION 1..15: note = ATaRI peptide
PSIRRLGSGILTFSW

SEQ ID NO: 7790 - protein, 12 aa, synthetic construct
  REGION 1..12: note = ATaRI peptide
MTQVNATSCKSC

SEQ ID NO: 7791 - protein, 18 aa, synthetic construct
  REGION 1..18: note = ATaRI peptide
LEITDRSFSIHLVFFGVW

SEQ ID NO: 7792 - protein, 34 aa, synthetic construct
  REGION 1..34: note = ATaRI peptide
ENGDIIAEVQGFLFRHFFITWRVRGRLKKGKLHL

SEQ ID NO: 7793 - protein, 9 aa, synthetic construct
  REGION 1..9: note = ATaRI peptide
DFLNSLLSW

SEQ ID NO: 7794 - protein, 18 aa, synthetic construct
  REGION 1..18: note = ATaRI peptide
DETLRRPGGRFSTPPQRP

SEQ ID NO: 7795 - protein, 15 aa, synthetic construct
  REGION 1..15: note = ATaRI peptide
AFQEPPPKVSQAMAS

SEQ ID NO: 7796 - protein, 75 aa, synthetic construct
  REGION 1..75: note = ATaRI peptide
YGESSAPPGGCAVLQLSYAGLAFYLPERSTPRCFPWSQIRVAFPLRESDFTSFLSYGALCLCTLGLRCPCPPHSE

SEQ ID NO: 7797 - protein, 48 aa, synthetic construct
  REGION 1..48: note = ATaRI peptide
MVTFLDKLVSHYFELISLENSFGAWVIKEKASASSRGARAGRAHFGAV

SEQ ID NO: 7798 - protein, 47 aa, synthetic construct
  REGION 1..47: note = ATaRI peptide
YQLYFQEPVSMAPRATMGALVFAFPLPVSFLFALSLSPLILCGISQK

SEQ ID NO: 7799 - protein, 47 aa, synthetic construct
  REGION 1..47: note = ATaRI peptide
SLFRASDEVRGGDGCRRTGGGSCEGSRVPSVWQGPGVAIWPPFLSFL

SEQ ID NO: 7800 - protein, 9 aa, synthetic construct
  REGION 1..9: note = ATaRI peptide
QGKDIDLNK

SEQ ID NO: 7801 - protein, 9 aa, synthetic construct
  REGION 1..9: note = ATaRI peptide
EDVARDTNR

SEQ ID NO: 7802 - protein, 25 aa, synthetic construct
  REGION 1..25: note = ATaRI peptide
RMKDLGIQVRANMAVRPQLLRKREI

SEQ ID NO: 7803 - protein, 14 aa, synthetic construct
  REGION 1..14: note = ATaRI peptide
HHKVRPYQVSLFMS

SEQ ID NO: 7804 - protein, 18 aa, synthetic construct
  REGION 1..18: note = ATaRI peptide
DPTKFQHQVSCIPFLFDF

SEQ ID NO: 7805 - protein, 9 aa, synthetic construct
  REGION 1..9: note = ATaRI peptide
HDEIMFGFR

SEQ ID NO: 7806 - protein, 14 aa, synthetic construct
  REGION 1..14: note = ATaRI peptide
LTDVANKKVKAIYI

SEQ ID NO: 7807 - protein, 11 aa, synthetic construct
  REGION 1..11: note = ATaRI peptide
LYAATDAYVRA

SEQ ID NO: 7808 - protein, 17 aa, synthetic construct
  REGION 1..17: note = ATaRI peptide
VQRFAINKGMLRSINKM

SEQ ID NO: 7809 - protein, 38 aa, synthetic construct
  REGION 1..38: note = ATaRI peptide
FSKLENPRRLNITFFFFNLNQFCLFFYHIFLYVKNTIH

SEQ ID NO: 7810 - protein, 17 aa, synthetic construct
  REGION 1..17: note = ATaRI peptide
DIAYKSTEVLNKEEAHF

SEQ ID NO: 7811 - protein, 9 aa, synthetic construct
  REGION 1..9: note = ATaRI peptide
ENVLTDIKL

SEQ ID NO: 7812 - protein, 10 aa, synthetic construct
  REGION 1..10: note = ATaRI peptide
LQQLEADIGK

SEQ ID NO: 7813 - protein, 21 aa, synthetic construct
  REGION 1..21: note = ATaRI peptide
SLKTALPMVSFAKSDVPKLHS

SEQ ID NO: 7814 - protein, 9 aa, synthetic construct
  REGION 1..9: note = ATaRI peptide
APADINLNR

SEQ ID NO: 7815 - protein, 13 aa, synthetic construct
  REGION 1..13: note = ATaRI peptide
PILFLRGSVSIYL

SEQ ID NO: 7816 - protein, 34 aa, synthetic construct
  REGION 1..34: note = ATaRI peptide
CPKKLLLPRFIFQFFSCNFCIFCCYLCDSNYTSL

SEQ ID NO: 7817 - protein, 27 aa, synthetic construct
  REGION 1..27: note = ATaRI peptide
SGSNISKKRYRVPYFYVLYLLYEYFFF

SEQ ID NO: 7818 - protein, 9 aa, synthetic construct
  REGION 1..9: note = ATaRI peptide
ILVDMAKMR

SEQ ID NO: 7819 - protein, 24 aa, synthetic construct
  REGION 1..24: note = ATaRI peptide
FCQTNSVQVKYCGLQELLENKHFL

SEQ ID NO: 7820 - protein, 35 aa, synthetic construct
  REGION 1..35: note = ATaRI peptide
FQEKKMPLVSVTFMLQGIFLVYLNLCFISFLVLKF

SEQ ID NO: 7821 - protein, 49 aa, synthetic construct
  REGION 1..49: note = ATaRI peptide
PRRAARAQVGAQRGPGPTILLLLLLLLLLLGCRGLSLPLSLARPLRPAL

SEQ ID NO: 7822 - protein, 9 aa, synthetic construct
  REGION 1..9: note = ATaRI peptide
NIKIQKKPG

SEQ ID NO: 7823 - protein, 12 aa, synthetic construct
  REGION 1..12: note = ATaRI peptide
PMKVQNQESMSK

SEQ ID NO: 7824 - protein, 9 aa, synthetic construct
  REGION 1..9: note = ATaRI peptide
VKNVPCGTR

SEQ ID NO: 7825 - protein, 14 aa, synthetic construct
  REGION 1..14: note = ATaRI peptide
TERKKALIGLNVVL

SEQ ID NO: 7826 - protein, 57 aa, synthetic construct
  REGION 1..57: note = ATaRI peptide
EKKISEIEGKQKWQSCLSPPQTPPCGQWVGEPLPLPFNCAQGCHDLCATAAFLHVET

SEQ ID NO: 7827 - protein, 49 aa, synthetic construct
  REGION 1..49: note = ATaRI peptide
QAVARRPRVRKEAAWGRWAAALRRGTPAWEWVVTVTQRGLPERRDWSAA

SEQ ID NO: 7828 - protein, 28 aa, synthetic construct
  REGION 1..28: note = ATaRI peptide
MSADFQHAVSVLPVPCLPRGVGVGGLRG

SEQ ID NO: 7829 - protein, 10 aa, synthetic construct
  REGION 1..10: note = ATaRI peptide
PKFGLLDQVH

SEQ ID NO: 7830 - protein, 50 aa, synthetic construct
  REGION 1..50: note = ATaRI peptide
TGTTKKARRWGECPPCPPHYLSIIWCWESPAEGREFKGRRLKSLSIFSKP

SEQ ID NO: 7831 - protein, 9 aa, synthetic construct
  REGION 1..9: note = ATaRI peptide
PLHSTGVDV

SEQ ID NO: 7832 - protein, 18 aa, synthetic construct
  REGION 1..18: note = ATaRI peptide
LALDACSRVSLCPSPECL

SEQ ID NO: 7833 - protein, 13 aa, synthetic construct
  REGION 1..13: note = ATaRI peptide
LERALQQKVQKGT

SEQ ID NO: 7834 - protein, 96 aa, synthetic construct
  REGION 1..96: note = ATaRI peptide
VVHTPISQVRGLTGAAGGVGVWKCPWCAHDVLGALYWGKGGWEWGAAGASGAIRKVQVMLHPHSWVLVTAVRKWRLLHLEAMWPVQFCAEHGRHRR

SEQ ID NO: 7835 - protein, 9 aa, synthetic construct
  REGION 1..9: note = ATaRI peptide
HIIHLERNK

SEQ ID NO: 7836 - protein, 65 aa, synthetic construct
  REGION 1..65: note = ATaRI peptide
GDCCKDCRVRNSSLLETGKKKKKKRKPVYIKICFLRFLSQHYFYFMVMGKILCHLCIILKHTLLR

SEQ ID NO: 7837 - protein, 9 aa, synthetic construct
  REGION 1..9: note = ATaRI peptide
LYTVHLKQR

SEQ ID NO: 7838 - protein, 9 aa, synthetic construct
  REGION 1..9: note = ATaRI peptide
TCIMNPEVV

SEQ ID NO: 7839 - protein, 37 aa, synthetic construct
  REGION 1..37: note = ATaRI peptide
VPCGAGEPGTQPGSPRLLWRGRETHRGREGCGRQPGL

SEQ ID NO: 7840 - protein, 11 aa, synthetic construct
  REGION 1..11: note = ATaRI peptide
PIERGLRVVSF

SEQ ID NO: 7841 - protein, 12 aa, synthetic construct
  REGION 1..12: note = ATaRI peptide
IDAIIDKSGRCF

SEQ ID NO: 7842 - protein, 46 aa, synthetic construct
  REGION 1..46: note = ATaRI peptide
CQGGDLRKVRLPRLPGAQPVWAGGTPGRGMGRPFTSVIIRKLGEPQ

SEQ ID NO: 7843 - protein, 9 aa, synthetic construct
  REGION 1..9: note = ATaRI peptide
LPYPNNLNR

SEQ ID NO: 7844 - protein, 22 aa, synthetic construct
  REGION 1..22: note = ATaRI peptide
QPESVSCIRKNLLCFVFLNNPL

SEQ ID NO: 7845 - protein, 35 aa, synthetic construct
  REGION 1..35: note = ATaRI peptide
SGAEAKKLVSLVSMLIEEFTRVQIWWVPTKPNLPV

SEQ ID NO: 7846 - protein, 19 aa, synthetic construct
  REGION 1..19: note = ATaRI peptide
DEGIKTLEGEYDCRSLIPD

SEQ ID NO: 7847 - protein, 19 aa, synthetic construct
  REGION 1..19: note = ATaRI peptide
GPQLKAIKASVSSSFVKMD

SEQ ID NO: 7848 - protein, 11 aa, synthetic construct
  REGION 1..11: note = ATaRI peptide
KTKSCSGVVSI

SEQ ID NO: 7849 - protein, 9 aa, synthetic construct
  REGION 1..9: note = ATaRI peptide
EQLQEETFR

SEQ ID NO: 7850 - protein, 9 aa, synthetic construct
  REGION 1..9: note = ATaRI peptide
LKDEIDVLR

SEQ ID NO: 7851 - protein, 25 aa, synthetic construct
  REGION 1..25: note = ATaRI peptide
KYLEKAKSVSMNFVGISLYLLITFQ

SEQ ID NO: 7852 - protein, 33 aa, synthetic construct
  REGION 1..33: note = ATaRI peptide
LRSVDTFRGYVGLPVAQWVQVVTGLHNCTYTHF

SEQ ID NO: 7853 - protein, 9 aa, synthetic construct
  REGION 1..9: note = ATaRI peptide
LQDLQMTKV

SEQ ID NO: 7854 - protein, 11 aa, synthetic construct
  REGION 1..11: note = ATaRI peptide
HCSILFWKVLI

SEQ ID NO: 7855 - protein, 83 aa, synthetic construct
  REGION 1..83: note = ATaRI peptide
KTLSQLQRGNGHCSRIDRFCNRNILCPEDQSNEGKLIILLGIQFLLNIGFNIGRNLHSFLVFIINIPPIRMATIKSSDSTKCW

SEQ ID NO: 7856 - protein, 32 aa, synthetic construct
  REGION 1..32: note = ATaRI peptide
TNNSPEIQVNSYWPKGFMLVIMLVTGFGRASV

SEQ ID NO: 7857 - protein, 12 aa, synthetic construct
  REGION 1..12: note = ATaRI peptide
YGVQLVEEVSLD

SEQ ID NO: 7858 - protein, 12 aa, synthetic construct
  REGION 1..12: note = ATaRI peptide
IRDSGNNSGNIV

SEQ ID NO: 7859 - protein, 9 aa, synthetic construct
  REGION 1..9: note = ATaRI peptide
HKPSKLKRR

SEQ ID NO: 7860 - protein, 9 aa, synthetic construct
  REGION 1..9: note = ATaRI peptide
GFKYGSGQK

SEQ ID NO: 7861 - protein, 17 aa, synthetic construct
  REGION 1..17: note = ATaRI peptide
KKSKILSKVCINFVAYL

SEQ ID NO: 7862 - protein, 10 aa, synthetic construct
  REGION 1..10: note = ATaRI peptide
QFALTGMRGN

SEQ ID NO: 7863 - protein, 18 aa, synthetic construct
  REGION 1..18: note = ATaRI peptide
IRTMMSPDGYPLEVLRVY

SEQ ID NO: 7864 - protein, 9 aa, synthetic construct
  REGION 1..9: note = ATaRI peptide
QRPINSKGQ

SEQ ID NO: 7865 - protein, 9 aa, synthetic construct
  REGION 1..9: note = ATaRI peptide
GEKMKVLEE

SEQ ID NO: 7866 - protein, 50 aa, synthetic construct
  REGION 1..50: note = ATaRI peptide
IRESETLKGRKLFKASFKTLFRKLFLETILELLKGKKGHIVCSGSKSFMV

SEQ ID NO: 7867 - protein, 25 aa, synthetic construct
  REGION 1..25: note = ATaRI peptide
IITEYMAKGEFLPLPRACKGFKLKK

SEQ ID NO: 7868 - protein, 20 aa, synthetic construct
  REGION 1..20: note = ATaRI peptide
TYGKIPYPGMVYLAIYNQAV

SEQ ID NO: 7869 - protein, 13 aa, synthetic construct
  REGION 1..13: note = ATaRI peptide
ASGDDKSKVSAQF

SEQ ID NO: 7870 - protein, 34 aa, synthetic construct
  REGION 1..34: note = ATaRI peptide
YGENQLQDVGTIIKMKKYKYLLLVTKTVGFKIKN

SEQ ID NO: 7871 - protein, 9 aa, synthetic construct
  REGION 1..9: note = ATaRI peptide
SGEGQKLGR

SEQ ID NO: 7872 - protein, 9 aa, synthetic construct
  REGION 1..9: note = ATaRI peptide
IQRFNSTHR

SEQ ID NO: 7873 - protein, 9 aa, synthetic construct
  REGION 1..9: note = ATaRI peptide
FIFEHIIKR

SEQ ID NO: 7874 - protein, 9 aa, synthetic construct
  REGION 1..9: note = ATaRI peptide
ALLVYDITR

SEQ ID NO: 7875 - protein, 27 aa, synthetic construct
  REGION 1..27: note = ATaRI peptide
RSTDDRGEVTGDHLYYKVVIQATHTCL

SEQ ID NO: 7876 - protein, 9 aa, synthetic construct
  REGION 1..9: note = ATaRI peptide
GKGSTFAKV

SEQ ID NO: 7877 - protein, 10 aa, synthetic construct
  REGION 1..10: note = ATaRI peptide
LLIGVFKHGK

SEQ ID NO: 7878 - protein, 23 aa, synthetic construct
  REGION 1..23: note = ATaRI peptide
VKPVSEENRYVRISWTEMNNPAL

SEQ ID NO: 7879 - protein, 15 aa, synthetic construct
  REGION 1..15: note = ATaRI peptide
QLVDMGAKVRHLFCC

SEQ ID NO: 7880 - protein, 9 aa, synthetic construct
  REGION 1..9: note = ATaRI peptide
LVSVLWVEK

SEQ ID NO: 7881 - protein, 11 aa, synthetic construct
  REGION 1..11: note = ATaRI peptide
LSSLIKKKVST

SEQ ID NO: 7882 - protein, 10 aa, synthetic construct
  REGION 1..10: note = ATaRI peptide
KRENLSPTCK

SEQ ID NO: 7883 - protein, 28 aa, synthetic construct
  REGION 1..28: note = ATaRI peptide
ISRDTLCSGKIFIFLSVICLSFENNMIF

SEQ ID NO: 7884 - protein, 66 aa, synthetic construct
  REGION 1..66: note = ATaRI peptide
DRTLLGTFSKLSFSFSNFPCMSWCLNRISKNFLMSVLARADFTLTCTLLSALSWKLSFASHACVTQ

SEQ ID NO: 7885 - protein, 10 aa, synthetic construct
  REGION 1..10: note = ATaRI peptide
QEQQNLTAGL

SEQ ID NO: 7886 - protein, 9 aa, synthetic construct
  REGION 1..9: note = ATaRI peptide
DIYKQESTR

SEQ ID NO: 7887 - protein, 32 aa, synthetic construct
  REGION 1..32: note = ATaRI peptide
THVFQRQKVTELLPPSRNPSPSPHLRAFLGPV

SEQ ID NO: 7888 - protein, 51 aa, synthetic construct
  REGION 1..51: note = ATaRI peptide
EDTCKTIEVSQVTPTASQPSLQCLGVYDFLSATLDIPILTFHSLLLEWPPS

SEQ ID NO: 7889 - protein, 28 aa, synthetic construct
  REGION 1..28: note = ATaRI peptide
AADAPVTQVTPPESLSTGHMGVSPYGIA

SEQ ID NO: 7890 - protein, 22 aa, synthetic construct
  REGION 1..22: note = ATaRI peptide
SAPAATSQVSDDALVSMLSRAP

SEQ ID NO: 7891 - protein, 16 aa, synthetic construct
  REGION 1..16: note = ATaRI peptide
QCLIFTLMGRKYFLFP

SEQ ID NO: 7892 - protein, 47 aa, synthetic construct
  REGION 1..47: note = ATaRI peptide
RQVEKSTEVGFAFELNLYYYYHRLNILYLKSFFYFRHFTFFCKYLQN

SEQ ID NO: 7893 - protein, 19 aa, synthetic construct
  REGION 1..19: note = ATaRI peptide
ALGEMVSPRCLFKCFVFGN

SEQ ID NO: 7894 - protein, 19 aa, synthetic construct
  REGION 1..19: note = ATaRI peptide
NLIGEETKVSFRQKCQSNP

SEQ ID NO: 7895 - protein, 38 aa, synthetic construct
  REGION 1..38: note = ATaRI peptide
LYGCYFAQVTCFHAFLSIYVVYKFFFFFLETVSLYCSG

SEQ ID NO: 7896 - protein, 9 aa, synthetic construct
  REGION 1..9: note = ATaRI peptide
HERFEIKDK

SEQ ID NO: 7897 - protein, 24 aa, synthetic construct
  REGION 1..24: note = ATaRI peptide
LKERERRKGGCMNWALLHFVKTLT

SEQ ID NO: 7898 - protein, 44 aa, synthetic construct
  REGION 1..44: note = ATaRI peptide
TDDQDVELGETLDSSLVSLFCSDDFSSLRIIRRHSEALHLIIAH

SEQ ID NO: 7899 - protein, 32 aa, synthetic construct
  REGION 1..32: note = ATaRI peptide
KHGFDYAKVIFRHFYTASIYFVHNGEKPFSVS

SEQ ID NO: 7900 - protein, 27 aa, synthetic construct
  REGION 1..27: note = ATaRI peptide
GPSVEPGSMYVFLCLQHSTVVPQVCLR

SEQ ID NO: 7901 - protein, 9 aa, synthetic construct
  REGION 1..9: note = ATaRI peptide
RDTFLVERG

SEQ ID NO: 7902 - protein, 26 aa, synthetic construct
  REGION 1..26: note = ATaRI peptide
TACEQPGQVSDAGFLYHHSCASPSLI

SEQ ID NO: 7903 - protein, 25 aa, synthetic construct
  REGION 1..25: note = ATaRI peptide
FLRNQGTPSKPRFCDHLNGGLGLWE

SEQ ID NO: 7904 - protein, 9 aa, synthetic construct
  REGION 1..9: note = ATaRI peptide
LKSHLHPFK

SEQ ID NO: 7905 - protein, 45 aa, synthetic construct
  REGION 1..45: note = ATaRI peptide
PRPKNLDVGKEKNTIFSILPGKFFVLLSFLPWKHLIAQKHIIQDT

SEQ ID NO: 7906 - protein, 9 aa, synthetic construct
  REGION 1..9: note = ATaRI peptide
IQNLIKIQV

SEQ ID NO: 7907 - protein, 9 aa, synthetic construct
  REGION 1..9: note = ATaRI peptide
SGDGLDSDG

SEQ ID NO: 7908 - protein, 10 aa, synthetic construct
  REGION 1..10: note = ATaRI peptide
ASISYTYCGK

SEQ ID NO: 7909 - protein, 24 aa, synthetic construct
  REGION 1..24: note = ATaRI peptide
SFCRALKGGKYSVHITFRIGNNSL

SEQ ID NO: 7910 - protein, 41 aa, synthetic construct
  REGION 1..41: note = ATaRI peptide
RKSHVYSCRYFKCPFRQVIFTDVSVWHAKSKRRKFRVFVYL

SEQ ID NO: 7911 - protein, 16 aa, synthetic construct
  REGION 1..16: note = ATaRI peptide
FRAGMKKEGNNNDDDN

SEQ ID NO: 7912 - protein, 11 aa, synthetic construct
  REGION 1..11: note = ATaRI peptide
CELPLDDQVHI

SEQ ID NO: 7913 - protein, 51 aa, synthetic construct
  REGION 1..51: note = ATaRI peptide
MYKDILLLGKFFFFNLRRNYAYFILAILYRVCSVCTKYLQTLANGAVTSQV

SEQ ID NO: 7914 - protein, 13 aa, synthetic construct
  REGION 1..13: note = ATaRI peptide
LLQEMLLGGEYIE

SEQ ID NO: 7915 - protein, 44 aa, synthetic construct
  REGION 1..44: note = ATaRI peptide
TLVHADQICKFIDYFSTKIFLNYPRKSGIVGKNLLVTRNGKNLV

SEQ ID NO: 7916 - protein, 13 aa, synthetic construct
  REGION 1..13: note = ATaRI peptide
EAQPTKSLVRIIV

SEQ ID NO: 7917 - protein, 9 aa, synthetic construct
  REGION 1..9: note = ATaRI peptide
PITKNTEIG

SEQ ID NO: 7918 - protein, 9 aa, synthetic construct
  REGION 1..9: note = ATaRI peptide
PPPADHVPW

SEQ ID NO: 7919 - protein, 60 aa, synthetic construct
  REGION 1..60: note = ATaRI peptide
VEARRFQDVRIGTQLFIENRISKIWFDERTCFRNIAVLNVGFIILSKIYKFLEALVSSNK

SEQ ID NO: 7920 - protein, 9 aa, synthetic construct
  REGION 1..9: note = ATaRI peptide
RDKSIELQK

SEQ ID NO: 7921 - protein, 39 aa, synthetic construct
  REGION 1..39: note = ATaRI peptide
LEVPIPEMVCRITYVYISGKNESTVSRRIFSLAECELIV

SEQ ID NO: 7922 - protein, 20 aa, synthetic construct
  REGION 1..20: note = ATaRI peptide
FDDTENKSGWLFFFCVCGGG

SEQ ID NO: 7923 - protein, 40 aa, synthetic construct
  REGION 1..40: note = ATaRI peptide
PINISSQQVHNLFQVDTDSLRGNWAFFFFFSTLPLISTVF

SEQ ID NO: 7924 - protein, 17 aa, synthetic construct
  REGION 1..17: note = ATaRI peptide
VLDSIKTKVNLNFLPPP

SEQ ID NO: 7925 - protein, 32 aa, synthetic construct
  REGION 1..32: note = ATaRI peptide
PISVSSEQVCFVMTGLFTGGAFSQGRRPWPPE

SEQ ID NO: 7926 - protein, 9 aa, synthetic construct
  REGION 1..9: note = ATaRI peptide
EPSARTTAR

SEQ ID NO: 7927 - protein, 9 aa, synthetic construct
  REGION 1..9: note = ATaRI peptide
ERPQPLPPG

SEQ ID NO: 7928 - protein, 9 aa, synthetic construct
  REGION 1..9: note = ATaRI peptide
GLDYGGLAR

SEQ ID NO: 7929 - protein, 28 aa, synthetic construct
  REGION 1..28: note = ATaRI peptide
HPHSAARQVGSHWGSLEEPSTPASPQAP

SEQ ID NO: 7930 - protein, 14 aa, synthetic construct
  REGION 1..14: note = ATaRI peptide
SLNELLHRVSITQF

SEQ ID NO: 7931 - protein, 9 aa, synthetic construct
  REGION 1..9: note = ATaRI peptide
ASIKHDIYR

SEQ ID NO: 7932 - protein, 22 aa, synthetic construct
  REGION 1..22: note = ATaRI peptide
LSRKQPFEGKYGLTFLCSITSC

SEQ ID NO: 7933 - protein, 19 aa, synthetic construct
  REGION 1..19: note = ATaRI peptide
PVNHGPQEVKKKKKKKRLY

SEQ ID NO: 7934 - protein, 10 aa, synthetic construct
  REGION 1..10: note = ATaRI peptide
PQDNDFLSSM

SEQ ID NO: 7935 - protein, 18 aa, synthetic construct
  REGION 1..18: note = ATaRI peptide
QPGPIKTKVSCILLVITL

SEQ ID NO: 7936 - protein, 40 aa, synthetic construct
  REGION 1..40: note = ATaRI peptide
LNTHTLEIVSEFLYFNCISSSNYSGVYWLCGGPHLLFSQN

SEQ ID NO: 7937 - protein, 16 aa, synthetic construct
  REGION 1..16: note = ATaRI peptide
ISLTGITQVIILSSSF

SEQ ID NO: 7938 - protein, 46 aa, synthetic construct
  REGION 1..46: note = ATaRI peptide
KSYGNFYKVKFLYLIITWFLMINLLKFACTLDCNFPGVFHGKKPYN

SEQ ID NO: 7939 - protein, 28 aa, synthetic construct
  REGION 1..28: note = ATaRI peptide
KLTTKENKVCEINVCRCLHHLKTAVHFC

SEQ ID NO: 7940 - protein, 17 aa, synthetic construct
  REGION 1..17: note = ATaRI peptide
FSFKGENQVKVSNIIRG

SEQ ID NO: 7941 - protein, 9 aa, synthetic construct
  REGION 1..9: note = ATaRI peptide
LTVLFFLEV

SEQ ID NO: 7942 - protein, 19 aa, synthetic construct
  REGION 1..19: note = ATaRI peptide
WLAIGIIQVRNYTGNITSK

SEQ ID NO: 7943 - protein, 9 aa, synthetic construct
  REGION 1..9: note = ATaRI peptide
NMNLKREAV

SEQ ID NO: 7944 - protein, 58 aa, synthetic construct
  REGION 1..58: note = ATaRI peptide
FSVEQSDKVLWHFEMVIFKRINVFIALYLKTSLFFIHTLIWEPRCIQYLSYLDREKLI

SEQ ID NO: 7945 - protein, 9 aa, synthetic construct
  REGION 1..9: note = ATaRI peptide
VKFGLNMTK

SEQ ID NO: 7946 - protein, 9 aa, synthetic construct
  REGION 1..9: note = ATaRI peptide
LQVIFRRIK

SEQ ID NO: 7947 - protein, 18 aa, synthetic construct
  REGION 1..18: note = ATaRI peptide
RTVHPILLVSHYFALFLF

SEQ ID NO: 7948 - protein, 9 aa, synthetic construct
  REGION 1..9: note = ATaRI peptide
TVELMTWIK

SEQ ID NO: 7949 - protein, 27 aa, synthetic construct
  REGION 1..27: note = ATaRI peptide
DLLKRNENVRHFKFYIWISFPALCILA

SEQ ID NO: 7950 - protein, 28 aa, synthetic construct
  REGION 1..28: note = ATaRI peptide
LLDIANGHVSNHLESYIYVYIYIFFLEK

SEQ ID NO: 7951 - protein, 9 aa, synthetic construct
  REGION 1..9: note = ATaRI peptide
ETSAQALPG

SEQ ID NO: 7952 - protein, 14 aa, synthetic construct
  REGION 1..14: note = ATaRI peptide
WDLDILEKRYPRFQ

SEQ ID NO: 7953 - protein, 23 aa, synthetic construct
  REGION 1..23: note = ATaRI peptide
LTENILKVVSIGISYTVTLQEQL

SEQ ID NO: 7954 - protein, 16 aa, synthetic construct
  REGION 1..16: note = ATaRI peptide
RTKELIAEVNPVIIGT

SEQ ID NO: 7955 - protein, 16 aa, synthetic construct
  REGION 1..16: note = ATaRI peptide
CLRSGNYQVRCMRGMQ

SEQ ID NO: 7956 - protein, 9 aa, synthetic construct
  REGION 1..9: note = ATaRI peptide
VTSFYDIPG

SEQ ID NO: 7957 - protein, 60 aa, synthetic construct
  REGION 1..60: note = ATaRI peptide
GLHCSTVKVSKSVYQTLVKNMLYGQVPWLIPVIPALWESEVGRSTEVKTSLANMVKPSLY

SEQ ID NO: 7958 - protein, 35 aa, synthetic construct
  REGION 1..35: note = ATaRI peptide
GYLEMRLPGKTGSQRQISETQYSHNCGGKFKSRFI

SEQ ID NO: 7959 - protein, 12 aa, synthetic construct
  REGION 1..12: note = ATaRI peptide
GIMYRYVLVRFY

SEQ ID NO: 7960 - protein, 34 aa, synthetic construct
  REGION 1..34: note = ATaRI peptide
TTTAWSCCGERARPSLARREAGSRGGSGCASRLA

SEQ ID NO: 7961 - protein, 33 aa, synthetic construct
  REGION 1..33: note = ATaRI peptide
LYLTLEILGKLFFCFILLFSNKIPMRFHFFIIW

SEQ ID NO: 7962 - protein, 11 aa, synthetic construct
  REGION 1..11: note = ATaRI peptide
LPMDICMLVRL

SEQ ID NO: 7963 - protein, 20 aa, synthetic construct
  REGION 1..20: note = ATaRI peptide
QAHLHLKHVSRLFFAKSFRE

SEQ ID NO: 7964 - protein, 22 aa, synthetic construct
  REGION 1..22: note = ATaRI peptide
YLFMIIWQVFFQMPRSWEENKN

SEQ ID NO: 7965 - protein, 9 aa, synthetic construct
  REGION 1..9: note = ATaRI peptide
ADVHAKDKG

SEQ ID NO: 7966 - protein, 13 aa, synthetic construct
  REGION 1..13: note = ATaRI peptide
PQSHETALVRFYC

SEQ ID NO: 7967 - protein, 13 aa, synthetic construct
  REGION 1..13: note = ATaRI peptide
AGDLETVKVSQCP

SEQ ID NO: 7968 - protein, 17 aa, synthetic construct
  REGION 1..17: note = ATaRI peptide
EICKLLLKVCSLKSYEI

SEQ ID NO: 7969 - protein, 29 aa, synthetic construct
  REGION 1..29: note = ATaRI peptide
ERLLGGQQGKLFRKKKKFQKSVVQGKYWG

SEQ ID NO: 7970 - protein, 24 aa, synthetic construct
  REGION 1..24: note = ATaRI peptide
EYQSVEEEVIYIRNLSFAFLEICG

SEQ ID NO: 7971 - protein, 11 aa, synthetic construct
  REGION 1..11: note = ATaRI peptide
FNRYNVIRVSF

SEQ ID NO: 7972 - protein, 9 aa, synthetic construct
  REGION 1..9: note = ATaRI peptide
DRSCYICHR

SEQ ID NO: 7973 - protein, 10 aa, synthetic construct
  REGION 1..10: note = ATaRI peptide
HDGKEVDEGT

SEQ ID NO: 7974 - protein, 36 aa, synthetic construct
  REGION 1..36: note = ATaRI peptide
PVGSKKNKGILVEHKTVVHQIKLLLFGCTKYHYVKI

SEQ ID NO: 7975 - protein, 14 aa, synthetic construct
  REGION 1..14: note = ATaRI peptide
GKGDSTLQGERNYM

SEQ ID NO: 7976 - protein, 12 aa, synthetic construct
  REGION 1..12: note = ATaRI peptide
NLSKLKNKVKYT

SEQ ID NO: 7977 - protein, 32 aa, synthetic construct
  REGION 1..32: note = ATaRI peptide
IKAASVHTVRVKVTVVFYSNHVFPVKFVKPNI

SEQ ID NO: 7978 - protein, 34 aa, synthetic construct
  REGION 1..34: note = ATaRI peptide
LPNPEKCQGKVPKTPQVFLTISSSPVLLEEEFFL

SEQ ID NO: 7979 - protein, 28 aa, synthetic construct
  REGION 1..28: note = ATaRI peptide
TENKISDQVTNSVRVIGKVMNDRLNISF

SEQ ID NO: 7980 - protein, 60 aa, synthetic construct
  REGION 1..60: note = ATaRI peptide
GRLVPQEPGKGRPAATAARWGRGQGGWLRAPLRLGRFPASSQEDTRPLRVGRGDMQCFPH

SEQ ID NO: 7981 - protein, 9 aa, synthetic construct
  REGION 1..9: note = ATaRI peptide
FNIDHYRSR

SEQ ID NO: 7982 - protein, 32 aa, synthetic construct
  REGION 1..32: note = ATaRI peptide
NCSGFFPSVRNYFKLCYTTPINRNPEKELNDS

SEQ ID NO: 7983 - protein, 32 aa, synthetic construct
  REGION 1..32: note = ATaRI peptide
DLRGGLLQVCGYWPYFFHRLLTSLCSFFELFH

SEQ ID NO: 7984 - protein, 14 aa, synthetic construct
  REGION 1..14: note = ATaRI peptide
FRENGFCTRYFMFI

SEQ ID NO: 7985 - protein, 15 aa, synthetic construct
  REGION 1..15: note = ATaRI peptide
SFVKHISKGSGFRSL

SEQ ID NO: 7986 - protein, 22 aa, synthetic construct
  REGION 1..22: note = ATaRI peptide
ELVSQTGYGKSVENPSGQPRRY

SEQ ID NO: 7987 - protein, 27 aa, synthetic construct
  REGION 1..27: note = ATaRI peptide
VDTQDKNKVMDTQNQRLIRPESKCFLL

SEQ ID NO: 7988 - protein, 10 aa, synthetic construct
  REGION 1..10: note = ATaRI peptide
VHTVRCILVS

SEQ ID NO: 7989 - protein, 10 aa, synthetic construct
  REGION 1..10: note = ATaRI peptide
PLHWAALLGT

SEQ ID NO: 7990 - protein, 22 aa, synthetic construct
  REGION 1..22: note = ATaRI peptide
DPNIQDKEVEILSFLYCLLQRI

SEQ ID NO: 7991 - protein, 26 aa, synthetic construct
  REGION 1..26: note = ATaRI peptide
GTNSRRPNGRCIAFVIFCRPMDCGLF

SEQ ID NO: 7992 - protein, 9 aa, synthetic construct
  REGION 1..9: note = ATaRI peptide
AVIQRAWRR

SEQ ID NO: 7993 - protein, 62 aa, synthetic construct
  REGION 1..62: note = ATaRI peptide
SSVLRLNSGKAATAKQMVGKNMGKHFPLFHPQRQKTLEQIWPGFSNGHLISWDYYCSQHLSP

SEQ ID NO: 7994 - protein, 19 aa, synthetic construct
  REGION 1..19: note = ATaRI peptide
QQIIKNITVRSMVPEALQY

SEQ ID NO: 7995 - protein, 25 aa, synthetic construct
  REGION 1..25: note = ATaRI peptide
QSAISKHLVSILKLFLLRMNTGCIG

SEQ ID NO: 7996 - protein, 9 aa, synthetic construct
  REGION 1..9: note = ATaRI peptide
MLIGILHMR

SEQ ID NO: 7997 - protein, 14 aa, synthetic construct
  REGION 1..14: note = ATaRI peptide
QATALRIYGKSSFV

SEQ ID NO: 7998 - protein, 17 aa, synthetic construct
  REGION 1..17: note = ATaRI peptide
QQDETHKLVRTNGSLFS

SEQ ID NO: 7999 - protein, 22 aa, synthetic construct
  REGION 1..22: note = ATaRI peptide
LSRKLNSGGEARPWRPGVVEEE

SEQ ID NO: 8000 - protein, 63 aa, synthetic construct
  REGION 1..63: note = ATaRI peptide
KHRTMSQEVLNQKGEMAVSSGLWQMLTYNSEHLKDYLTLEGLSYHRGFCKTQHNSKPPNNELP

SEQ ID NO: 8001 - protein, 16 aa, synthetic construct
  REGION 1..16: note = ATaRI peptide
KKLAMAKQVDSLSLFN

SEQ ID NO: 8002 - protein, 12 aa, synthetic construct
  REGION 1..12: note = ATaRI peptide
DEITVTRQVSGN

SEQ ID NO: 8003 - protein, 10 aa, synthetic construct
  REGION 1..10: note = ATaRI peptide
YNVVVDTEVS

SEQ ID NO: 8004 - protein, 18 aa, synthetic construct
  REGION 1..18: note = ATaRI peptide
TLRVAQNLVSLILSYLYV

SEQ ID NO: 8005 - protein, 31 aa, synthetic construct
  REGION 1..31: note = ATaRI peptide
VQKFAEINGETLGHPNLCPVTLFSLLNINLP

SEQ ID NO: 8006 - protein, 28 aa, synthetic construct
  REGION 1..28: note = ATaRI peptide
FYMDKVLMVSTSNAVSYFRDKNTNKNIL

SEQ ID NO: 8007 - protein, 109 aa, synthetic construct
  REGION 1..109: note = ATaRI peptide
ATRHGLPESKRGRGARGYRDKPGRHRVGGAPGPVGCGCAGWAWPGVRAAAAEGKAARPLSGRELRGAHTDAGTAPGDSGWPLLCALSGALTLEEKRSHPPFKISHSAAL

SEQ ID NO: 8008 - protein, 12 aa, synthetic construct
  REGION 1..12: note = ATaRI peptide
PESINLQQVGSS

SEQ ID NO: 8009 - protein, 9 aa, synthetic construct
  REGION 1..9: note = ATaRI peptide
HHTLKGVQV

SEQ ID NO: 8010 - protein, 14 aa, synthetic construct
  REGION 1..14: note = ATaRI peptide
ARKSQELQVRSYSY

SEQ ID NO: 8011 - protein, 14 aa, synthetic construct
  REGION 1..14: note = ATaRI peptide
KGTEYTLSGNMTAF

SEQ ID NO: 8012 - protein, 46 aa, synthetic construct
  REGION 1..46: note = ATaRI peptide
DPVTLETKGEISSSLYSIKQSLTSEVIHNFVTGSTSCDVELLLYFS

SEQ ID NO: 8013 - protein, 9 aa, synthetic construct
  REGION 1..9: note = ATaRI peptide
IKGKENKGR

SEQ ID NO: 8014 - protein, 14 aa, synthetic construct
  REGION 1..14: note = ATaRI peptide
GVFCDFDGGKFIFS

SEQ ID NO: 8015 - protein, 77 aa, synthetic construct
  REGION 1..77: note = ATaRI peptide
QPVLPGFMVSMFYILYIPNIFYLVGNFKENILYCIFGEGEYFVFSSYSPPFPQFTLSQICDCFYIFLVYFIEVYVNT

SEQ ID NO: 8016 - protein, 35 aa, synthetic construct
  REGION 1..35: note = ATaRI peptide
LQALFINKGNFIPSFLSFLLSYHCIFSDHTSLCNT

SEQ ID NO: 8017 - protein, 29 aa, synthetic construct
  REGION 1..29: note = ATaRI peptide
QYHLWKNEVSDLLSDNGMCLFLQNSIGLG

SEQ ID NO: 8018 - protein, 9 aa, synthetic construct
  REGION 1..9: note = ATaRI peptide
GRYPGAFDR

SEQ ID NO: 8019 - protein, 19 aa, synthetic construct
  REGION 1..19: note = ATaRI peptide
THILKAHAGELCIDDAQVL

SEQ ID NO: 8020 - protein, 9 aa, synthetic construct
  REGION 1..9: note = ATaRI peptide
DCSFYTGFK

SEQ ID NO: 8021 - protein, 11 aa, synthetic construct
  REGION 1..11: note = ATaRI peptide
AGQKLIYAGMN

SEQ ID NO: 8022 - protein, 17 aa, synthetic construct
  REGION 1..17: note = ATaRI peptide
RENPQLLQVTNQCQFHK

SEQ ID NO: 8023 - protein, 25 aa, synthetic construct
  REGION 1..25: note = ATaRI peptide
KVSGKFKRVCSCNSVIIYLHPLYSW

SEQ ID NO: 8024 - protein, 11 aa, synthetic construct
  REGION 1..11: note = ATaRI peptide
ILLLQHSKVSS

SEQ ID NO: 8025 - protein, 9 aa, synthetic construct
  REGION 1..9: note = ATaRI peptide
KQLEDNIQR

SEQ ID NO: 8026 - protein, 16 aa, synthetic construct
  REGION 1..16: note = ATaRI peptide
QGFSSTDGGKCSLPRL

SEQ ID NO: 8027 - protein, 156 aa, synthetic construct
  REGION 1..156: note = ATaRI peptide
QDGTSRAAGKSWGPLDARMVQGACISLSFINEMSALLSLHRGSSPSAQPQMQPSQWPHKAGTGPRWVTEDQMGRSSEEIIRHFTSDFGGVFLWCLWSLYLCLFSKLICILPPGIFIFLIGNIQIERAIHDGSWMGNIFKACGIFTESFGNCAICIL

SEQ ID NO: 8028 - protein, 11 aa, synthetic construct
  REGION 1..11: note = ATaRI peptide
YIQLRGVQVCG

SEQ ID NO: 8029 - protein, 41 aa, synthetic construct
  REGION 1..41: note = ATaRI peptide
QRIIKEEIGELSVEVSIMPCSHIGRNAIHVCYRESNCKMLE

SEQ ID NO: 8030 - protein, 12 aa, synthetic construct
  REGION 1..12: note = ATaRI peptide
EGPAERRERLPF

SEQ ID NO: 8031 - protein, 48 aa, synthetic construct
  REGION 1..48: note = ATaRI peptide
QELHKSLRVRCSQQLSHILKVLHVYLIFLLWLTSGKVEATRVIPPCLS

SEQ ID NO: 8032 - protein, 9 aa, synthetic construct
  REGION 1..9: note = ATaRI peptide
SKMLATACW

SEQ ID NO: 8033 - protein, 9 aa, synthetic construct
  REGION 1..9: note = ATaRI peptide
SGRFLGTTW

SEQ ID NO: 8034 - protein, 33 aa, synthetic construct
  REGION 1..33: note = ATaRI peptide
VRVQAVDSGKLLTGGCQPHLPTTHVGFANIVWN

SEQ ID NO: 8035 - protein, 29 aa, synthetic construct
  REGION 1..29: note = ATaRI peptide
APLNPGSQVRTAGVGKVKGTGSLWEARKT

SEQ ID NO: 8036 - protein, 18 aa, synthetic construct
  REGION 1..18: note = ATaRI peptide
YQEDTIPEGESPAAAVPS

SEQ ID NO: 8037 - protein, 13 aa, synthetic construct
  REGION 1..13: note = ATaRI peptide
LQSVKLQEGKQMP

SEQ ID NO: 8038 - protein, 45 aa, synthetic construct
  REGION 1..45: note = ATaRI peptide
IAIQACKEVGPQGRPSAPPIPRAQWPFSCKVAASSTGRGEARMTP

SEQ ID NO: 8039 - protein, 135 aa, synthetic construct
  REGION 1..135: note = ATaRI peptide
PGGAAAPQVRRGAGGMHRAGDPGGPGPGALRHFIARFAKCKVPGHVCGLFVGAIGRVGVRRAPPRALRGARRVGVTRGSFGAPTQRPLRPRARTGAQKTKRRENRAAISVWTIHILQKCNPFQLCPLPPKFAIFP

SEQ ID NO: 8040 - protein, 26 aa, synthetic construct
  REGION 1..26: note = ATaRI peptide
AGRKSTASRYTPSPAPSLSTHRLRSS

SEQ ID NO: 8041 - protein, 101 aa, synthetic construct
  REGION 1..101: note = ATaRI peptide
GVRNQQTLGECPASVVRVETRVGTWSQSPGEKRPGASAPFLAERTFAGFPLHSGRDLSFLDLPLLVQFPAGERFCFCWAAEPYPSINTLFKSNAWNLPGAQ

SEQ ID NO: 8042 - protein, 10 aa, synthetic construct
  REGION 1..10: note = ATaRI peptide
DQALRYASGT

SEQ ID NO: 8043 - protein, 43 aa, synthetic construct
  REGION 1..43: note = ATaRI peptide
EPFQKIGPSMRDSLWGQGLGGGWPREAGLSLTARAGVAVGGIT

SEQ ID NO: 8044 - protein, 43 aa, synthetic construct
  REGION 1..43: note = ATaRI peptide
AQRNSANNSRSPQAGLDLRVPLCSSCSSLPPIPTICASCDVVR

SEQ ID NO: 8045 - protein, 34 aa, synthetic construct
  REGION 1..34: note = ATaRI peptide
YPGPKGMKVSKGCSPDSGLVQAGHPRPISAQKEG

SEQ ID NO: 8046 - protein, 11 aa, synthetic construct
  REGION 1..11: note = ATaRI peptide
DPGFQGDKVIA

SEQ ID NO: 8047 - protein, 108 aa, synthetic construct
  REGION 1..108: note = ATaRI peptide
PRGQLGPEVRLSGPLHCPSWPDCSPQPALSWVLKALAWAGAPSARTPPRASPDLPTSSSYTALPRAPSRDLLCPAVTWQGGFPAPSLLCTLVTLGFSFPELLTMPCSW

SEQ ID NO: 8048 - protein, 10 aa, synthetic construct
  REGION 1..10: note = ATaRI peptide
EQGLIGQRVS

SEQ ID NO: 8049 - protein, 18 aa, synthetic construct
  REGION 1..18: note = ATaRI peptide
PKGSKGAEVRGPGVQQGD

SEQ ID NO: 8050 - protein, 14 aa, synthetic construct
  REGION 1..14: note = ATaRI peptide
RDGQAGQQVSGNWH

SEQ ID NO: 8051 - protein, 42 aa, synthetic construct
  REGION 1..42: note = ATaRI peptide
AQGPPGFKVRYLLIHLPTLCPFCLDADSSGSDPLGTHVPGPV

SEQ ID NO: 8052 - protein, 39 aa, synthetic construct
  REGION 1..39: note = ATaRI peptide
RTKTLTNNGETPCIFLLNCIFLVFVILVWRWGLLAVLLR

SEQ ID NO: 8053 - protein, 64 aa, synthetic construct
  REGION 1..64: note = ATaRI peptide
QLQTWGIQVSADFLESLPFSLSSIHPSIFSSSFSQNLYETVCTSCRRVYKEGILEVPSLSSLPG

SEQ ID NO: 8054 - protein, 49 aa, synthetic construct
  REGION 1..49: note = ATaRI peptide
VFERHQKKVRCLEIPATLSPEERCRRENQIFPFCLPQRISLAMKIHTSP

SEQ ID NO: 8055 - protein, 17 aa, synthetic construct
  REGION 1..17: note = ATaRI peptide
EGCQSVIQVLCLIVTSS

SEQ ID NO: 8056 - protein, 25 aa, synthetic construct
  REGION 1..25: note = ATaRI peptide
LVPEAEPEVTGTGACWGHLPSGEFA

SEQ ID NO: 8057 - protein, 9 aa, synthetic construct
  REGION 1..9: note = ATaRI peptide
LNLSYNKIR

SEQ ID NO: 8058 - protein, 17 aa, synthetic construct
  REGION 1..17: note = ATaRI peptide
AAGPGLPGVGATPTPDP

SEQ ID NO: 8059 - protein, 9 aa, synthetic construct
  REGION 1..9: note = ATaRI peptide
TQNLANFAK

SEQ ID NO: 8060 - protein, 63 aa, synthetic construct
  REGION 1..63: note = ATaRI peptide
KDGKLKYQVVLGQGVGQREGSPMVFPGKDCLGRGSGSCPERANHGSGKLVPGATVYAGRRQQV

SEQ ID NO: 8061 - protein, 33 aa, synthetic construct
  REGION 1..33: note = ATaRI peptide
QTTRLILIGEDSRPALPWKVIPSILRSWGRGGT

SEQ ID NO: 8062 - protein, 14 aa, synthetic construct
  REGION 1..14: note = ATaRI peptide
SDMHLLDLVRIYFY

SEQ ID NO: 8063 - protein, 11 aa, synthetic construct
  REGION 1..11: note = ATaRI peptide
PPEDDEEEGKL

SEQ ID NO: 8064 - protein, 9 aa, synthetic construct
  REGION 1..9: note = ATaRI peptide
TWGELLSKW

SEQ ID NO: 8065 - protein, 23 aa, synthetic construct
  REGION 1..23: note = ATaRI peptide
YQLERLMQVKRETSLCLTKRVQD

SEQ ID NO: 8066 - protein, 72 aa, synthetic construct
  REGION 1..72: note = ATaRI peptide
IIDLLLCEVCIRGHSTLAFVCSVLEENRFCFECQLCQNRIGLFNYFILLLGNLGLSDFLGLKLMIVFVKGVL

SEQ ID NO: 8067 - protein, 23 aa, synthetic construct
  REGION 1..23: note = ATaRI peptide
VEAECKIQVTAAELRHVPAGWVS

SEQ ID NO: 8068 - protein, 26 aa, synthetic construct
  REGION 1..26: note = ATaRI peptide
PGEHYSEKVSLQEPEASPAPGGHRGL

SEQ ID NO: 8069 - protein, 17 aa, synthetic construct
  REGION 1..17: note = ATaRI peptide
VLLQWHEKVCERCHAPQ

SEQ ID NO: 8070 - protein, 26 aa, synthetic construct
  REGION 1..26: note = ATaRI peptide
GDKPRKATWSVRKDPDTEKHEFLFHL

SEQ ID NO: 8071 - protein, 28 aa, synthetic construct
  REGION 1..28: note = ATaRI peptide
SDVHTMDLGKISSCRVHALWPENRAVCC

SEQ ID NO: 8072 - protein, 10 aa, synthetic construct
  REGION 1..10: note = ATaRI peptide
NCLQVLNPGK

SEQ ID NO: 8073 - protein, 63 aa, synthetic construct
  REGION 1..63: note = ATaRI peptide
DDLHCIDISKQGMGACLFKIVIFIYLFIFRQDLCLSLRLECGGMISVASASRTQVILLPHPPQ

SEQ ID NO: 8074 - protein, 17 aa, synthetic construct
  REGION 1..17: note = ATaRI peptide
LQLLEHEQGKVKLNTVA

SEQ ID NO: 8075 - protein, 16 aa, synthetic construct
  REGION 1..16: note = ATaRI peptide
KLLYHSDKGNLNLSGL

SEQ ID NO: 8076 - protein, 13 aa, synthetic construct
  REGION 1..13: note = ATaRI peptide
LRSRFLDARYVKP

SEQ ID NO: 8077 - protein, 23 aa, synthetic construct
  REGION 1..23: note = ATaRI peptide
SDIQPTSVVSIHRLPEGMSQGGA

SEQ ID NO: 8078 - protein, 16 aa, synthetic construct
  REGION 1..16: note = ATaRI peptide
LYSPHNLNVSTLGSQL

SEQ ID NO: 8079 - protein, 89 aa, synthetic construct
  REGION 1..89: note = ATaRI peptide
KFSCVPESVSFMHDRPSPLPPPSLRSLHPDLHSTQGCSGSTHAPSPTGILSACVSSLPLEAEPCNPVTGTPEVGGWVVCISGPISQCPM

SEQ ID NO: 8080 - protein, 33 aa, synthetic construct
  REGION 1..33: note = ATaRI peptide
SLAEIEKEVSKPSGEGRAGLGHRLHTGVSRVFP

SEQ ID NO: 8081 - protein, 26 aa, synthetic construct
  REGION 1..26: note = ATaRI peptide
IFHPEIQKVTENFMLHNCTKLITVLG

SEQ ID NO: 8082 - protein, 64 aa, synthetic construct
  REGION 1..64: note = ATaRI peptide
TKEFSSLMVRAGSTSTAFVQSAEKHFLKPLVLQKTQGRGLTCSLSPTMPGPLAILGKATWRQMG

SEQ ID NO: 8083 - protein, 17 aa, synthetic construct
  REGION 1..17: note = ATaRI peptide
QLQTLNVKGRDQEAVSV

SEQ ID NO: 8084 - protein, 65 aa, synthetic construct
  REGION 1..65: note = ATaRI peptide
QKLLQDNQRLGSAPRPQPQSPSPCSPLRSREECVSPSLPLPLPRASLVRIQSGCFNWHQRREKRI

SEQ ID NO: 8085 - protein, 9 aa, synthetic construct
  REGION 1..9: note = ATaRI peptide
ILKSLENER

SEQ ID NO: 8086 - protein, 75 aa, synthetic construct
  REGION 1..75: note = ATaRI peptide
SLRRRDVACEFWDGELVSTLPAGWAGRVDGPPSVGHAWRALSVSPREGQSSPAMEHRLWGQPRCGCRVPVQTPTM

SEQ ID NO: 8087 - protein, 100 aa, synthetic construct
  REGION 1..100: note = ATaRI peptide
MHRQIRSQVSAGAGVPGPALSETCRVALQGGRSQQLRFEPQLLGLLAQQEVEALPSEPPFAPSLVSGLLGGCLETSYSGVWRGSCQRGGSPPRLGQGGWC

SEQ ID NO: 8088 - protein, 56 aa, synthetic construct
  REGION 1..56: note = ATaRI peptide
SLDTESLQVCRAPCPCPPSRGETPTWCSLPASGSCSPAPGSQGLPQQTEGRAPLWL

SEQ ID NO: 8089 - protein, 25 aa, synthetic construct
  REGION 1..25: note = ATaRI peptide
MSPGDLAKVGSSRLHGGEGHARPLS

SEQ ID NO: 8090 - protein, 34 aa, synthetic construct
  REGION 1..34: note = ATaRI peptide
MGKLKRKEVSMSPIRSHCWQMVEPLGLPASLGKR

SEQ ID NO: 8091 - protein, 18 aa, synthetic construct
  REGION 1..18: note = ATaRI peptide
YLITPSEKVNLPPEEDSG

SEQ ID NO: 8092 - protein, 9 aa, synthetic construct
  REGION 1..9: note = ATaRI peptide
EPVRFHCPW

SEQ ID NO: 8093 - protein, 47 aa, synthetic construct
  REGION 1..47: note = ATaRI peptide
NGKWEVLIGEWPCFQRKAPPHRTSTPFHALVSHSVIDSLDPQNLVFR

SEQ ID NO: 8094 - protein, 81 aa, synthetic construct
  REGION 1..81: note = ATaRI peptide
LCGSITPEVRGPGPHGVQRSRSPGRGGVGSRMEGALLSGREAGLVTGPVLGWGVCGRKKHLTQAVRQSRFHQLFCGLGQNI

SEQ ID NO: 8095 - protein, 40 aa, synthetic construct
  REGION 1..40: note = ATaRI peptide
QPTSHMRLGELDLPAQLGPLRVSVPLQIFFFFFFGFLFGR

SEQ ID NO: 8096 - protein, 48 aa, synthetic construct
  REGION 1..48: note = ATaRI peptide
DRLKVLMQVCREKAPDPWGASFHLGDAAWLVFPFSGWCLLWAQTFLTQ

SEQ ID NO: 8097 - protein, 81 aa, synthetic construct
  REGION 1..81: note = ATaRI peptide
CRGAFRSPVSISSPTPPFPSSTFPCALPAPLPIPTAANPRLALFHIFSQSTENRQVIPESLPFLSSCPPVFKEVLSCPVLG

SEQ ID NO: 8098 - protein, 28 aa, synthetic construct
  REGION 1..28: note = ATaRI peptide
TLYCPHVEVRPVSSREMNIARTWQSWGL

SEQ ID NO: 8099 - protein, 9 aa, synthetic construct
  REGION 1..9: note = ATaRI peptide
DPEGAQILQ

SEQ ID NO: 8100 - protein, 9 aa, synthetic construct
  REGION 1..9: note = ATaRI peptide
IKTIRRDIL

SEQ ID NO: 8101 - protein, 56 aa, synthetic construct
  REGION 1..56: note = ATaRI peptide
VFGSEMASGEPQGGGGQAGTPWDLTQTTAPFQPCQGCVGQWLRAQSGVRQLRQCHE

SEQ ID NO: 8102 - protein, 57 aa, synthetic construct
  REGION 1..57: note = ATaRI peptide
SCPDKGFTGGLHPLPIEGLSHRPWTEHWPQCQKEAFLETCHVPGTCHVTSLFPSGKW

SEQ ID NO: 8103 - protein, 35 aa, synthetic construct
  REGION 1..35: note = ATaRI peptide
LLPELHKTGVSLPCSSSRIPGPFPFPSGETRLAVT

SEQ ID NO: 8104 - protein, 25 aa, synthetic construct
  REGION 1..25: note = ATaRI peptide
LREQHCKEVSLGPGSFPPALHAHPL

SEQ ID NO: 8105 - protein, 47 aa, synthetic construct
  REGION 1..47: note = ATaRI peptide
AEADSEKAVTKAALVYSSGYRWQERRSTTKCRGAWIKAGGLEHFARS

SEQ ID NO: 8106 - protein, 13 aa, synthetic construct
  REGION 1..13: note = ATaRI peptide
ELEIIVLNEYVLE

SEQ ID NO: 8107 - protein, 122 aa, synthetic construct
  REGION 1..122: note = ATaRI peptide
KLENERLKVRSESWGPGSWMGPSELMRGLVLRGPGGILTKRESEKPGFDQAWWLRPVIPTLWEAKAGGSLEPSSRPAWATWQNPVSAKHTKSSQAWRHAPVVPATREAELGESLEPGRLRLW

SEQ ID NO: 8108 - protein, 26 aa, synthetic construct
  REGION 1..26: note = ATaRI peptide
EMNKEIEAVLLSFLVFFSYPIPYLTQ

SEQ ID NO: 8109 - protein, 110 aa, synthetic construct
  REGION 1..110: note = ATaRI peptide
RDWLLRREVSGGPGGRRPFRPLATETFSLAVGTFCSREPVQSNNLHLFLDFCVYIPLSWGFCPLQPILAFRGAPLTSQVPRALKASLLPSASWAPSPFCCCQSNLGPRFS

SEQ ID NO: 8110 - protein, 9 aa, synthetic construct
  REGION 1..9: note = ATaRI peptide
LTPAIPALW

SEQ ID NO: 8111 - protein, 16 aa, synthetic construct
  REGION 1..16: note = ATaRI peptide
ASDEVREKVREEKWSF

SEQ ID NO: 8112 - protein, 24 aa, synthetic construct
  REGION 1..24: note = ATaRI peptide
SKTASPWKVRTPLQIIVFKSFARS

SEQ ID NO: 8113 - protein, 9 aa, synthetic construct
  REGION 1..9: note = ATaRI peptide
PWRRGRRGR

SEQ ID NO: 8114 - protein, 36 aa, synthetic construct
  REGION 1..36: note = ATaRI peptide
DVELYLKLVRTPGTDGWKGTGGRELLCHPSPGRGLA

SEQ ID NO: 8115 - protein, 43 aa, synthetic construct
  REGION 1..43: note = ATaRI peptide
SLASGGNDVSLRLWVVSMGVSRQKHYNNVIVIMVVWIMGSCCN

SEQ ID NO: 8116 - protein, 9 aa, synthetic construct
  REGION 1..9: note = ATaRI peptide
VSSLSQMIR

SEQ ID NO: 8117 - protein, 27 aa, synthetic construct
  REGION 1..27: note = ATaRI peptide
LLIIATTHVRPFWGEFSLWYLSNDVLT

SEQ ID NO: 8118 - protein, 39 aa, synthetic construct
  REGION 1..39: note = ATaRI peptide
ASQVAGITGVHHHAQLIFVFLVETGFHHVGQNDLHLLTS

SEQ ID NO: 8119 - protein, 23 aa, synthetic construct
  REGION 1..23: note = ATaRI peptide
SSSKFSEQVTCVVGSVWLLVTLC

SEQ ID NO: 8120 - protein, 9 aa, synthetic construct
  REGION 1..9: note = ATaRI peptide
VSEVWHKKR

SEQ ID NO: 8121 - protein, 147 aa, synthetic construct
  REGION 1..147: note = ATaRI peptide
MFRGYAQQVSHLSCPGDTQGHDPPGLTLTPKPEWKIAMAAEHWLAGLTDQALTPKPFTRVRTVEPPSNLLTFNPTSQMDRLRFRGRATCTGHTASKWWRGILFFVGEGGYRVSLCHPGWSAVVQSWLTAPSTSRAQAVVPPQAPKVL

SEQ ID NO: 8122 - protein, 12 aa, synthetic construct
  REGION 1..12: note = ATaRI peptide
EPEDKDVTVSTF

SEQ ID NO: 8123 - protein, 38 aa, synthetic construct
  REGION 1..38: note = ATaRI peptide
DKFTFSLDVSTVWRLFYVDFVSIKREICFCIRLDFKNT

SEQ ID NO: 8124 - protein, 36 aa, synthetic construct
  REGION 1..36: note = ATaRI peptide
SLSLVFHAVCISILRIIHEITYNACVSRQKKFEERG

SEQ ID NO: 8125 - protein, 51 aa, synthetic construct
  REGION 1..51: note = ATaRI peptide
FMIVIPLQVKEPSSHLSLPFLALSRAQLQACMGRGSHLTLKPQLLLVEVED

SEQ ID NO: 8126 - protein, 9 aa, synthetic construct
  REGION 1..9: note = ATaRI peptide
GAILFPVVW

SEQ ID NO: 8127 - protein, 58 aa, synthetic construct
  REGION 1..58: note = ATaRI peptide
RIFAMMDKVRWGGGAGPGPGRQGVGGRNWSPWILGLALLPTSSMAHGRRHGVLSLLSS

SEQ ID NO: 8128 - protein, 40 aa, synthetic construct
  REGION 1..40: note = ATaRI peptide
GCPAPGPAGTGAAGWQEHEIPRRGLAGGEEGFGPGGREAA

SEQ ID NO: 8129 - protein, 18 aa, synthetic construct
  REGION 1..18: note = ATaRI peptide
VPDKMVGFSKYPCCLLFP

SEQ ID NO: 8130 - protein, 55 aa, synthetic construct
  REGION 1..55: note = ATaRI peptide
GETIKQLQVCEPGARSTAAARSRSSASWPRRSAYGWHSLAGLALCSIVLRLPSSI

SEQ ID NO: 8131 - protein, 18 aa, synthetic construct
  REGION 1..18: note = ATaRI peptide
RMGGGSIEVCLNYRLVGK

SEQ ID NO: 8132 - protein, 48 aa, synthetic construct
  REGION 1..48: note = ATaRI peptide
ITTDTGFMRYVGTWGSRGFRERLQGSLHVVQASYPCVCNSPRDPGHFV

SEQ ID NO: 8133 - protein, 44 aa, synthetic construct
  REGION 1..44: note = ATaRI peptide
GGFIANLEVSKHCGHFQWDGGGSVFAVFLWPVKLVVFSYVTGVG

SEQ ID NO: 8134 - protein, 10 aa, synthetic construct
  REGION 1..10: note = ATaRI peptide
HPNLVQLLGE

SEQ ID NO: 8135 - protein, 9 aa, synthetic construct
  REGION 1..9: note = ATaRI peptide
LEKKNFIHR

SEQ ID NO: 8136 - protein, 40 aa, synthetic construct
  REGION 1..40: note = ATaRI peptide
KVYELMRACKPSSACSHEYMWAFQEIQLCRSVYTKLKVFP

SEQ ID NO: 8137 - protein, 53 aa, synthetic construct
  REGION 1..53: note = ATaRI peptide
SGFGSGTGGKLPQVLPSQAKWVPLAFSPKEMSMFYLTSLFSILKADWARGSRL

SEQ ID NO: 8138 - protein, 10 aa, synthetic construct
  REGION 1..10: note = ATaRI peptide
PGPSLRPQSK

SEQ ID NO: 8139 - protein, 19 aa, synthetic construct
  REGION 1..19: note = ATaRI peptide
YHDMLPAFVSLQSVLFFPP

SEQ ID NO: 8140 - protein, 9 aa, synthetic construct
  REGION 1..9: note = ATaRI peptide
QFQMNDQDG

SEQ ID NO: 8141 - protein, 56 aa, synthetic construct
  REGION 1..56: note = ATaRI peptide
ENGPAVHKGKSWAVFPPTGNPGLLSSSCYLQLPSFLASRTYGLQRDRIGKHQLLRA

SEQ ID NO: 8142 - protein, 9 aa, synthetic construct
  REGION 1..9: note = ATaRI peptide
TLAMDMRVR

SEQ ID NO: 8143 - protein, 63 aa, synthetic construct
  REGION 1..63: note = ATaRI peptide
KQFDLNYGSKSSSYLQGKELRQNQGPCSPRASRVCPCTEYLSFRNSSARPWAGFWGCRGEQSR

SEQ ID NO: 8144 - protein, 209 aa, synthetic construct
  REGION 1..209: note = ATaRI peptide
RKKEQAVQVRGGGWGGMGLEGRLADAQETQSQRVREFSVKLKVAERKKGVFSKHTLSPRSCYYQGPSINVGIGGGITVMQWKKPSLEEGDFSRVITVETCPRQDADLRHLPASPSSPLLIPEWNEICLPQVKWIVNAILKWSQGWTCTQITVRWPFRSFLGGALLGIAVLLEVLGDERSTHLWSIFRWCDFWYLGYLSWGEFVSLGAFG

SEQ ID NO: 8145 - protein, 20 aa, synthetic construct
  REGION 1..20: note = ATaRI peptide
STETGSAEVSVAAAHMLPLG

SEQ ID NO: 8146 - protein, 11 aa, synthetic construct
  REGION 1..11: note = ATaRI peptide
IEFGVSPKVRL

SEQ ID NO: 8147 - protein, 52 aa, synthetic construct
  REGION 1..52: note = ATaRI peptide
LQDALASNVSPHFHFWLHSLLGAGRPWVKETAHVFQADLGWHVTQLLAAPCP

SEQ ID NO: 8148 - protein, 21 aa, synthetic construct
  REGION 1..21: note = ATaRI peptide
VQGHYVQQVEDGFPDPSALDT

SEQ ID NO: 8149 - protein, 12 aa, synthetic construct
  REGION 1..12: note = ATaRI peptide
EYDDRTARVGVY

SEQ ID NO: 8150 - protein, 9 aa, synthetic construct
  REGION 1..9: note = ATaRI peptide
CSNGHIWLR

SEQ ID NO: 8151 - protein, 29 aa, synthetic construct
  REGION 1..29: note = ATaRI peptide
LPFIAYYMVSVSCPPTCLGFHPCGPWSLL

SEQ ID NO: 8152 - protein, 15 aa, synthetic construct
  REGION 1..15: note = ATaRI peptide
QLCDLNVEEYVWEGP

SEQ ID NO: 8153 - protein, 10 aa, synthetic construct
  REGION 1..10: note = ATaRI peptide
NGEWLASSCT

SEQ ID NO: 8154 - protein, 126 aa, synthetic construct
  REGION 1..126: note = ATaRI peptide
GQCLKTLIGECGSVWGLGLWGGPPLLGSLPLFFTSSSSLLCPGSAPAGGTFLRVRPFRQLPLTARWLCCSFWCSFPAMAFLLGQPGAPPPVLSASLRLLTGVLWAAPLPPGFGPLLSCQPLGSFLE

SEQ ID NO: 8155 - protein, 9 aa, synthetic construct
  REGION 1..9: note = ATaRI peptide
YILAATLDK

SEQ ID NO: 8156 - protein, 45 aa, synthetic construct
  REGION 1..45: note = ATaRI peptide
NFSVTGGKVSLITLKRLTCSQLTLPRGHTCYRLLYTQRHFSVPTK

SEQ ID NO: 8157 - protein, 56 aa, synthetic construct
  REGION 1..56: note = ATaRI peptide
VQKLQGHTGEGLRSCSHWLPVDVRTVPAGEAWCARRVPSSSPSHLSPPLAPLRNRC

SEQ ID NO: 8158 - protein, 159 aa, synthetic construct
  REGION 1..159: note = ATaRI peptide
AICGDRSSGTAAVGARGWWDRVVRPLQGLEASPNHPPVGQAGPKARVQGGRCLGHAPLPGLREAIPGFSRLWDSECWVGWGTGQPEASGEEVAADGKVSMGAASAAPPPLAGSGQGARVVPLTPNGLRGKNGLHSADTEQVTCLGPWSLVGWDLSLPHS

SEQ ID NO: 8159 - protein, 14 aa, synthetic construct
  REGION 1..14: note = ATaRI peptide
RAIVLFNPGMAFLP

SEQ ID NO: 8160 - protein, 22 aa, synthetic construct
  REGION 1..22: note = ATaRI peptide
HPGQRGETVSIEGAGGRGWLAL

SEQ ID NO: 8161 - protein, 45 aa, synthetic construct
  REGION 1..45: note = ATaRI peptide
LLRLPLERVSQGHGTDVSTAAARAWAAGLMRQSHRHPPQPLSAGR

SEQ ID NO: 8162 - protein, 47 aa, synthetic construct
  REGION 1..47: note = ATaRI peptide
FNMLIKYQVGCGPGRAWLAAPLPSTCVEATCVLRGEVGAGSAISGHV

SEQ ID NO: 8163 - protein, 10 aa, synthetic construct
  REGION 1..10: note = ATaRI peptide
QYTGGIAKVK

SEQ ID NO: 8164 - protein, 65 aa, synthetic construct
  REGION 1..65: note = ATaRI peptide
PCCGADVKVRGVEQQPVWLQPCGAELGSCVLATAAASAPLHSFHPLGPFPGDTRADVSWQNWEWV

SEQ ID NO: 8165 - protein, 116 aa, synthetic construct
  REGION 1..116: note = ATaRI peptide
LRWPFNQKVRPSLQASLGPHLGVPLGSAASVVQGCAGQGGLGSLDQVSAAGTSPCDAVSRGGELWQFVVSMISEHWSVTQAPGFLTCQININMTKKKHKAEWAGSMYPCDPSTLGG

SEQ ID NO: 8166 - protein, 49 aa, synthetic construct
  REGION 1..49: note = ATaRI peptide
GDPQRTVIRYRAQGRLHAAAQGLMFRKTRLRKRIVSEIYFPLKLTVYAL

SEQ ID NO: 8167 - protein, 44 aa, synthetic construct
  REGION 1..44: note = ATaRI peptide
CTVDPCHKVALPSLLPPYPPEGSAALPPSFPPTPRPSLLPPLPS

SEQ ID NO: 8168 - protein, 9 aa, synthetic construct
  REGION 1..9: note = ATaRI peptide
KKGQEQVLG

SEQ ID NO: 8169 - protein, 31 aa, synthetic construct
  REGION 1..31: note = ATaRI peptide
SEADRAQKVCVAVLGDSTRKEHHKVGRGSEN

SEQ ID NO: 8170 - protein, 36 aa, synthetic construct
  REGION 1..36: note = ATaRI peptide
RKKPSGALGKCRGGVGHHGDCLGGDGARRPTWGWGA

SEQ ID NO: 8171 - protein, 9 aa, synthetic construct
  REGION 1..9: note = ATaRI peptide
RENRYDCVV

SEQ ID NO: 8172 - protein, 64 aa, synthetic construct
  REGION 1..64: note = ATaRI peptide
LYPVIFHKVSSKTFWILWIIVTFVKVFNYLKSHIPMLTLKINTLGVVAHACNLSTLGGQGRRIT

SEQ ID NO: 8173 - protein, 22 aa, synthetic construct
  REGION 1..22: note = ATaRI peptide
YPECRDLSRYSFQKSSQSLSYF

SEQ ID NO: 8174 - protein, 9 aa, synthetic construct
  REGION 1..9: note = ATaRI peptide
FVCKMYTAR

SEQ ID NO: 8175 - protein, 9 aa, synthetic construct
  REGION 1..9: note = ATaRI peptide
GDDQEGEKV

SEQ ID NO: 8176 - protein, 9 aa, synthetic construct
  REGION 1..9: note = ATaRI peptide
QESFAKLNL

SEQ ID NO: 8177 - protein, 40 aa, synthetic construct
  REGION 1..40: note = ATaRI peptide
KLEDASNEVTLALFGSTHIAFGLYQYVFLACYKGQKDWEC

SEQ ID NO: 8178 - protein, 20 aa, synthetic construct
  REGION 1..20: note = ATaRI peptide
TSAEGKHKVGTFCHFVNLPG

SEQ ID NO: 8179 - protein, 15 aa, synthetic construct
  REGION 1..15: note = ATaRI peptide
LEKALQLKVNIKSFL

SEQ ID NO: 8180 - protein, 10 aa, synthetic construct
  REGION 1..10: note = ATaRI peptide
MLEQTLQKVV

SEQ ID NO: 8181 - protein, 32 aa, synthetic construct
  REGION 1..32: note = ATaRI peptide
NIDGKTPKVNDMILLNCMLCFKFYLMLYNLSK

SEQ ID NO: 8182 - protein, 22 aa, synthetic construct
  REGION 1..22: note = ATaRI peptide
KQLQYKLKVIIKFIKHENIHYA

SEQ ID NO: 8183 - protein, 26 aa, synthetic construct
  REGION 1..26: note = ATaRI peptide
ILDTEDQVVRSFKYLLLKGLLYTGLK

SEQ ID NO: 8184 - protein, 50 aa, synthetic construct
  REGION 1..50: note = ATaRI peptide
DKNLNCGMVRIKFSSSKFHMKPKRDTFWIPVYCWVYTHILYFHDACFYFS

SEQ ID NO: 8185 - protein, 17 aa, synthetic construct
  REGION 1..17: note = ATaRI peptide
FFDDCIEKVKVCTYTSV

SEQ ID NO: 8186 - protein, 9 aa, synthetic construct
  REGION 1..9: note = ATaRI peptide
GKDLSPKYR

SEQ ID NO: 8187 - protein, 29 aa, synthetic construct
  REGION 1..29: note = ATaRI peptide
ITYGYYNKVSRIDIRQDVVFIKNDYFVYL

SEQ ID NO: 8188 - protein, 28 aa, synthetic construct
  REGION 1..28: note = ATaRI peptide
VGKLHYPTGMGKDYPFFICFIIVFAFFF

SEQ ID NO: 8189 - protein, 25 aa, synthetic construct
  REGION 1..25: note = ATaRI peptide
PNSLQEVVVCNNNNIVIILHTHLSI

SEQ ID NO: 8190 - protein, 17 aa, synthetic construct
  REGION 1..17: note = ATaRI peptide
EHCNEGVQVGCQLLYLH

SEQ ID NO: 8191 - protein, 87 aa, synthetic construct
  REGION 1..87: note = ATaRI peptide
CYRRVLQHGAGRGSGEGRRASGRGLFPRRSVWKLDVGLCAHLGAFSPGAESVHTPSSARSFQFSICPPLLSPFPTAGLIFLLLSFVL

SEQ ID NO: 8192 - protein, 9 aa, synthetic construct
  REGION 1..9: note = ATaRI peptide
LPKIFRNDR

SEQ ID NO: 8193 - protein, 9 aa, synthetic construct
  REGION 1..9: note = ATaRI peptide
ALLIAELKR

SEQ ID NO: 8194 - protein, 9 aa, synthetic construct
  REGION 1..9: note = ATaRI peptide
NFPYLHCMW

SEQ ID NO: 8195 - protein, 53 aa, synthetic construct
  REGION 1..53: note = ATaRI peptide
KERMRRLMVRNSLQEPRKLLNPRPSAMRPLNMVVVEGKNENCLSKILVNFFEP

SEQ ID NO: 8196 - protein, 53 aa, synthetic construct
  REGION 1..53: note = ATaRI peptide
SALGPDGEVRDRHPFHCVLLNGVCAIPGSTILHAYYFILTVLFILSKNSNTLA

SEQ ID NO: 8197 - protein, 11 aa, synthetic construct
  REGION 1..11: note = ATaRI peptide
KIHQSTNQVCV

SEQ ID NO: 8198 - protein, 9 aa, synthetic construct
  REGION 1..9: note = ATaRI peptide
AFFQQCPER

SEQ ID NO: 8199 - protein, 25 aa, synthetic construct
  REGION 1..25: note = ATaRI peptide
EKDAKQIIEYVLHFSLGNALHEDDA

SEQ ID NO: 8200 - protein, 22 aa, synthetic construct
  REGION 1..22: note = ATaRI peptide
CDIVPCLQVRSLSSSTNIGQHQ

SEQ ID NO: 8201 - protein, 10 aa, synthetic construct
  REGION 1..10: note = ATaRI peptide
QQKPILNLGK

SEQ ID NO: 8202 - protein, 15 aa, synthetic construct
  REGION 1..15: note = ATaRI peptide
SIRDICKQRYDVINS

SEQ ID NO: 8203 - protein, 9 aa, synthetic construct
  REGION 1..9: note = ATaRI peptide
YKKSTAWLW

SEQ ID NO: 8204 - protein, 9 aa, synthetic construct
  REGION 1..9: note = ATaRI peptide
DEITKAAAK

SEQ ID NO: 8205 - protein, 36 aa, synthetic construct
  REGION 1..36: note = ATaRI peptide
GSEGDVMQVKKGTMEGKTSKYVHSHSGRRIPSVLVC

SEQ ID NO: 8206 - protein, 27 aa, synthetic construct
  REGION 1..27: note = ATaRI peptide
NRIAQVTKVITYLSIPFFIIEPEITIE

SEQ ID NO: 8207 - protein, 25 aa, synthetic construct
  REGION 1..25: note = ATaRI peptide
FHNTALDKVKSRGVVYSFLKIQNLY

SEQ ID NO: 8208 - protein, 39 aa, synthetic construct
  REGION 1..39: note = ATaRI peptide
PWKEQTQKVRLAATCLAGQAAIVSSAVSTVELRWELSAS

SEQ ID NO: 8209 - protein, 62 aa, synthetic construct
  REGION 1..62: note = ATaRI peptide
AQSRDLLKGITSMFYAQHRGKTIIVVCGAEWHSSGCRLSISYPKCLGPEVFWILDVFGFGYI

SEQ ID NO: 8210 - protein, 19 aa, synthetic construct
  REGION 1..19: note = ATaRI peptide
YPLCVLAEGKKRVTCCIAY

SEQ ID NO: 8211 - protein, 16 aa, synthetic construct
  REGION 1..16: note = ATaRI peptide
LEHEEENEVLEKTPSL

SEQ ID NO: 8212 - protein, 10 aa, synthetic construct
  REGION 1..10: note = ATaRI peptide
DGSDEKNCGK

SEQ ID NO: 8213 - protein, 16 aa, synthetic construct
  REGION 1..16: note = ATaRI peptide
YHELVQPSGTVEKHSP

SEQ ID NO: 8214 - protein, 30 aa, synthetic construct
  REGION 1..30: note = ATaRI peptide
KSYYLGLLRYVKHIFSSVCFTRNIVYLLSK

SEQ ID NO: 8215 - protein, 13 aa, synthetic construct
  REGION 1..13: note = ATaRI peptide
GQLADYNMVFYLF

SEQ ID NO: 8216 - protein, 16 aa, synthetic construct
  REGION 1..16: note = ATaRI peptide
EVMNDYNMVRKFIKAN

SEQ ID NO: 8217 - protein, 9 aa, synthetic construct
  REGION 1..9: note = ATaRI peptide
DVIFTERQA

SEQ ID NO: 8218 - protein, 32 aa, synthetic construct
  REGION 1..32: note = ATaRI peptide
MKKESLEAVSIKSNKGSHTTQLKKLIQPSILI

SEQ ID NO: 8219 - protein, 30 aa, synthetic construct
  REGION 1..30: note = ATaRI peptide
EREKLLKQVGKTNILILRCLVLVHVLICFF

SEQ ID NO: 8220 - protein, 10 aa, synthetic construct
  REGION 1..10: note = ATaRI peptide
KKREEHMDSK

SEQ ID NO: 8221 - protein, 13 aa, synthetic construct
  REGION 1..13: note = ATaRI peptide
STAQNLTSGEKTT

SEQ ID NO: 8222 - protein, 71 aa, synthetic construct
  REGION 1..71: note = ATaRI peptide
QENETHSQVKNVLNDFEIVLVYIFTPKQSIFYFKICFIYLLDFLTFKTARFCTVFIQNEWTPAFLPSINLY

SEQ ID NO: 8223 - protein, 11 aa, synthetic construct
  REGION 1..11: note = ATaRI peptide
QNNFAMKECIL

SEQ ID NO: 8224 - protein, 9 aa, synthetic construct
  REGION 1..9: note = ATaRI peptide
LQPSLPEEG

SEQ ID NO: 8225 - protein, 22 aa, synthetic construct
  REGION 1..22: note = ATaRI peptide
DGLGILGWGECSSIYAVLGHAL

SEQ ID NO: 8226 - protein, 22 aa, synthetic construct
  REGION 1..22: note = ATaRI peptide
DIVLTITKVTMCILFCGLGKPQ

SEQ ID NO: 8227 - protein, 10 aa, synthetic construct
  REGION 1..10: note = ATaRI peptide
SITYLVQTGK

SEQ ID NO: 8228 - protein, 9 aa, synthetic construct
  REGION 1..9: note = ATaRI peptide
SQDPDFTQV

SEQ ID NO: 8229 - protein, 35 aa, synthetic construct
  REGION 1..35: note = ATaRI peptide
FESCLGAKVGACGKRLNPLNSTSCLVTQRPGFHPT

SEQ ID NO: 8230 - protein, 12 aa, synthetic construct
  REGION 1..12: note = ATaRI peptide
NPSVMLGAGKCI

SEQ ID NO: 8231 - protein, 44 aa, synthetic construct
  REGION 1..44: note = ATaRI peptide
PVVEAITQVIAEVPAGLQSSCFFSCNVTKMLIFSRRSMEAGDVV

SEQ ID NO: 8232 - protein, 16 aa, synthetic construct
  REGION 1..16: note = ATaRI peptide
IDFEKEPLGKILFVQP

SEQ ID NO: 8233 - protein, 44 aa, synthetic construct
  REGION 1..44: note = ATaRI peptide
KEVYQKIEVRSHTALPAPEDLRESCSLCVLSADLKANGSINYIK

SEQ ID NO: 8234 - protein, 14 aa, synthetic construct
  REGION 1..14: note = ATaRI peptide
SPPFFENLVWLFIF

SEQ ID NO: 8235 - protein, 9 aa, synthetic construct
  REGION 1..9: note = ATaRI peptide
AARYLTNRG

SEQ ID NO: 8236 - protein, 47 aa, synthetic construct
  REGION 1..47: note = ATaRI peptide
IHLPSGEIVSIVFCFLQTLAFVSLGGGWIFTVTRLLVLVFLHSSILP

SEQ ID NO: 8237 - protein, 12 aa, synthetic construct
  REGION 1..12: note = ATaRI peptide
AAKGPFLLVSMK

SEQ ID NO: 8238 - protein, 106 aa, synthetic construct
  REGION 1..106: note = ATaRI peptide
GRMQRERRGKKNLVFVQLTKVSCWSEQIFEKSPILNACLHVGIMLQTDHKLPLIYGVVFFCCGFFFFFLETEFPSYCPGWRAMAWSQLTATSTSRVQAILLPQPPK

SEQ ID NO: 8239 - protein, 15 aa, synthetic construct
  REGION 1..15: note = ATaRI peptide
TIVITSHPGMGTRQA

SEQ ID NO: 8240 - protein, 11 aa, synthetic construct
  REGION 1..11: note = ATaRI peptide
SLTDCIGTVGI

SEQ ID NO: 8241 - protein, 22 aa, synthetic construct
  REGION 1..22: note = ATaRI peptide
KMREGPAKVRWAATAAQGAGRA

SEQ ID NO: 8242 - protein, 53 aa, synthetic construct
  REGION 1..53: note = ATaRI peptide
VPTDTKNKVKAFSVYISMQNSKGFMLDHKSGNLKGSLNIRTKKDSPGHYFVNP

SEQ ID NO: 8243 - protein, 31 aa, synthetic construct
  REGION 1..31: note = ATaRI peptide
MAEAPPVSGIVPARAGLGPFQGAEIGSVTKF

SEQ ID NO: 8244 - protein, 12 aa, synthetic construct
  REGION 1..12: note = ATaRI peptide
LKNVETHTGKPT

SEQ ID NO: 8245 - protein, 16 aa, synthetic construct
  REGION 1..16: note = ATaRI peptide
ARSPASQAGQLILSSE

SEQ ID NO: 8246 - protein, 17 aa, synthetic construct
  REGION 1..17: note = ATaRI peptide
NCQTCWQASECLYCIVY

SEQ ID NO: 8247 - protein, 40 aa, synthetic construct
  REGION 1..40: note = ATaRI peptide
RVHECDHPGEYQLVFTLQPAHTMSFRILLCYCLHCSRVML

SEQ ID NO: 8248 - protein, 23 aa, synthetic construct
  REGION 1..23: note = ATaRI peptide
KWCMGKHEVSFLSQVLIVPGRGS

SEQ ID NO: 8249 - protein, 17 aa, synthetic construct
  REGION 1..17: note = ATaRI peptide
SDSLKEDARYVTCYLLS

SEQ ID NO: 8250 - protein, 9 aa, synthetic construct
  REGION 1..9: note = ATaRI peptide
PHHRHQSDK

SEQ ID NO: 8251 - protein, 49 aa, synthetic construct
  REGION 1..49: note = ATaRI peptide
MHQCSEEKVGIFMFLGNPLEKEGPSIHPGFLPWPTHNLFALPVTTGTSI

SEQ ID NO: 8252 - protein, 9 aa, synthetic construct
  REGION 1..9: note = ATaRI peptide
HSSLDSSQR

SEQ ID NO: 8253 - protein, 9 aa, synthetic construct
  REGION 1..9: note = ATaRI peptide
PSWEQDFML

SEQ ID NO: 8254 - protein, 91 aa, synthetic construct
  REGION 1..91: note = ATaRI peptide
KTIRQSDEVSHCIFCLEVWFPAHASPHASSTLANIHPCILDYSSPFLIRGHATCLFLTSPEGSDDFIYVWPTLCPVTTHRLQSTSSALSGR

SEQ ID NO: 8255 - protein, 9 aa, synthetic construct
  REGION 1..9: note = ATaRI peptide
DHFLGPQER

SEQ ID NO: 8256 - protein, 14 aa, synthetic construct
  REGION 1..14: note = ATaRI peptide
LLNADCLQRECPAG

SEQ ID NO: 8257 - protein, 34 aa, synthetic construct
  REGION 1..34: note = ATaRI peptide
RIDLSTYRVSEDTAVGRIIDIKHGPRETVGQSWL

SEQ ID NO: 8258 - protein, 70 aa, synthetic construct
  REGION 1..70: note = ATaRI peptide
DLALDTIKVEAPPFSDSLNHHTHLALAFHSPRPGVPPILNTPHPEESYYVLPRIQNQIWFLNSRCLSLVR

SEQ ID NO: 8259 - protein, 27 aa, synthetic construct
  REGION 1..27: note = ATaRI peptide
FVRSQTTQGKALRALGIHLSSLIHIFP

SEQ ID NO: 8260 - protein, 47 aa, synthetic construct
  REGION 1..47: note = ATaRI peptide
GMQELELTVRSLRVSKYVAIHQQDMHGHLPDRSLPDHPIHTTRGSTS

SEQ ID NO: 8261 - protein, 31 aa, synthetic construct
  REGION 1..31: note = ATaRI peptide
SIDLLQKKGAYNPQLRPGTLLSLPPHTCPTT

SEQ ID NO: 8262 - protein, 11 aa, synthetic construct
  REGION 1..11: note = ATaRI peptide
FNHLYNHEGNA

SEQ ID NO: 8263 - protein, 45 aa, synthetic construct
  REGION 1..45: note = ATaRI peptide
RLEEIAEEGQFVGLATNLCGLVHKESPFGASGLRLEMGSLQCRRD

SEQ ID NO: 8264 - protein, 64 aa, synthetic construct
  REGION 1..64: note = ATaRI peptide
SLELQLNAVLFMESGEVALPGSLKGKVSGVLGCLPPPGSLSRLLPPILTIRDHGSAQFWSTNMS

SEQ ID NO: 8265 - protein, 41 aa, synthetic construct
  REGION 1..41: note = ATaRI peptide
ECRQACKQVTLGSQALKHHGVQFGFSCAHVLGLAHLLALQR

SEQ ID NO: 8266 - protein, 41 aa, synthetic construct
  REGION 1..41: note = ATaRI peptide
SKANTSTCRLVFHFPLPKSVENGILINDFKPSKRVLYSYVV

SEQ ID NO: 8267 - protein, 9 aa, synthetic construct
  REGION 1..9: note = ATaRI peptide
TYCTNFNNR

SEQ ID NO: 8268 - protein, 64 aa, synthetic construct
  REGION 1..64: note = ATaRI peptide
EDDRRTFTGDCDRPESVLRGHHFFAHIFPFKAASPVLTANVHNKINTESKGKMLFLPGSQFLPL

SEQ ID NO: 8269 - protein, 9 aa, synthetic construct
  REGION 1..9: note = ATaRI peptide
PNPCQKNQR

SEQ ID NO: 8270 - protein, 53 aa, synthetic construct
  REGION 1..53: note = ATaRI peptide
SKNCPLPRVREICFASFHICKLKISRVRLGTVAHACNPSTLGSRGRWIMRSGD

SEQ ID NO: 8271 - protein, 23 aa, synthetic construct
  REGION 1..23: note = ATaRI peptide
KRLKQKIKGMLLDFLLDHICSSF

SEQ ID NO: 8272 - protein, 31 aa, synthetic construct
  REGION 1..31: note = ATaRI peptide
QTKTYREKVSVIELRCGTLSKFLLHLGFLHQ

SEQ ID NO: 8273 - protein, 50 aa, synthetic construct
  REGION 1..50: note = ATaRI peptide
ILKMIEENRYPDLSRWGFWGVLLGPNSSQTLCRSSGRQSVRKCVWSIGHE

SEQ ID NO: 8274 - protein, 17 aa, synthetic construct
  REGION 1..17: note = ATaRI peptide
AHRVVKRKSKSMINILF

SEQ ID NO: 8275 - protein, 34 aa, synthetic construct
  REGION 1..34: note = ATaRI peptide
AVSSVHTQVRNVKVNHEGKGAAEEPLKDRPIKDQ

SEQ ID NO: 8276 - protein, 31 aa, synthetic construct
  REGION 1..31: note = ATaRI peptide
PMVIAGQTGMNLQGWAGRRQEQASIAFFNEK

SEQ ID NO: 8277 - protein, 39 aa, synthetic construct
  REGION 1..39: note = ATaRI peptide
ALLVKPQKVTVFYSLFSKLFTWNIYYFHNQRKISIILKQ

SEQ ID NO: 8278 - protein, 77 aa, synthetic construct
  REGION 1..77: note = ATaRI peptide
CVLCFEYKVSLEWHNFIPALISQLQFCLLTHPLCLGHGGIINFSHFCIQIHNPFVGIDMIISQGKDLCLLQREPHFC

SEQ ID NO: 8279 - protein, 9 aa, synthetic construct
  REGION 1..9: note = ATaRI peptide
RSCQAAAPR

SEQ ID NO: 8280 - protein, 53 aa, synthetic construct
  REGION 1..53: note = ATaRI peptide
YEQKIRHFGKSTTWISFFVMFGIICTCAKNGFIKREPKRKVANSNFVASGTAV

SEQ ID NO: 8281 - protein, 15 aa, synthetic construct
  REGION 1..15: note = ATaRI peptide
SRIEINQTGKLLLDS

SEQ ID NO: 8282 - protein, 41 aa, synthetic construct
  REGION 1..41: note = ATaRI peptide
DGESFELKVRMFELLTICSCGKHFPTDSLEELCDSVYVCHI

SEQ ID NO: 8283 - protein, 9 aa, synthetic construct
  REGION 1..9: note = ATaRI peptide
HMKGVNSGK

SEQ ID NO: 8284 - protein, 18 aa, synthetic construct
  REGION 1..18: note = ATaRI peptide
LLLEEIYRVCPQLPLIEE

SEQ ID NO: 8285 - protein, 9 aa, synthetic construct
  REGION 1..9: note = ATaRI peptide
VMSYLFAQV

SEQ ID NO: 8286 - protein, 9 aa, synthetic construct
  REGION 1..9: note = ATaRI peptide
PLAIYNSIR

SEQ ID NO: 8287 - protein, 9 aa, synthetic construct
  REGION 1..9: note = ATaRI peptide
QSNCHGPIS

SEQ ID NO: 8288 - protein, 36 aa, synthetic construct
  REGION 1..36: note = ATaRI peptide
YFLTFAVEVSMSHLLVVTLYLVHLISSPYLFTIFPF

SEQ ID NO: 8289 - protein, 11 aa, synthetic construct
  REGION 1..11: note = ATaRI peptide
IRNEDLIFVSH

SEQ ID NO: 8290 - protein, 10 aa, synthetic construct
  REGION 1..10: note = ATaRI peptide
GVCVCGDESK

SEQ ID NO: 8291 - protein, 11 aa, synthetic construct
  REGION 1..11: note = ATaRI peptide
SITVLPKDSKF

SEQ ID NO: 8292 - protein, 9 aa, synthetic construct
  REGION 1..9: note = ATaRI peptide
ICTLGGDFA

SEQ ID NO: 8293 - protein, 19 aa, synthetic construct
  REGION 1..19: note = ATaRI peptide
DPLKINSMVSTFYKKLAWY

SEQ ID NO: 8294 - protein, 17 aa, synthetic construct
  REGION 1..17: note = ATaRI peptide
VLTVNPCMVSIFKALIF

SEQ ID NO: 8295 - protein, 12 aa, synthetic construct
  REGION 1..12: note = ATaRI peptide
KLFGNITQVSLF

SEQ ID NO: 8296 - protein, 15 aa, synthetic construct
  REGION 1..15: note = ATaRI peptide
NINDRQEEVSFFSQK

SEQ ID NO: 8297 - protein, 9 aa, synthetic construct
  REGION 1..9: note = ATaRI peptide
YSIERKSDG

SEQ ID NO: 8298 - protein, 53 aa, synthetic construct
  REGION 1..53: note = ATaRI peptide
IKLTFEATGKSYNSFFSPPLFLKLVNKWHVCFSLRYITGTSNLGRACDVSKIN

SEQ ID NO: 8299 - protein, 13 aa, synthetic construct
  REGION 1..13: note = ATaRI peptide
NRYDGIYKVLYLA

SEQ ID NO: 8300 - protein, 10 aa, synthetic construct
  REGION 1..10: note = ATaRI peptide
TTKRPISDGR

SEQ ID NO: 8301 - protein, 24 aa, synthetic construct
  REGION 1..24: note = ATaRI peptide
ECFHNVCKVSRIPSSLSLLGMKAH

SEQ ID NO: 8302 - protein, 10 aa, synthetic construct
  REGION 1..10: note = ATaRI peptide
QQKMNMSQVS

SEQ ID NO: 8303 - protein, 9 aa, synthetic construct
  REGION 1..9: note = ATaRI peptide
FRQLANSGK

SEQ ID NO: 8304 - protein, 9 aa, synthetic construct
  REGION 1..9: note = ATaRI peptide
RKVRKASRR

SEQ ID NO: 8305 - protein, 14 aa, synthetic construct
  REGION 1..14: note = ATaRI peptide
LSDHIKLSGEKMVD

SEQ ID NO: 8306 - protein, 24 aa, synthetic construct
  REGION 1..24: note = ATaRI peptide
TLLMPYHKVKEPAIIVPFTALPSM

SEQ ID NO: 8307 - protein, 10 aa, synthetic construct
  REGION 1..10: note = ATaRI peptide
AFMGRADKVS

SEQ ID NO: 8308 - protein, 13 aa, synthetic construct
  REGION 1..13: note = ATaRI peptide
LEAKRPWVVSHNF

SEQ ID NO: 8309 - protein, 32 aa, synthetic construct
  REGION 1..32: note = ATaRI peptide
LEARIKEKVLFGFNFGLSEFYFSKYKKYFAGV

SEQ ID NO: 8310 - protein, 19 aa, synthetic construct
  REGION 1..19: note = ATaRI peptide
ETLEKEKKSKFHKVRMKCL

SEQ ID NO: 8311 - protein, 31 aa, synthetic construct
  REGION 1..31: note = ATaRI peptide
QKISSKLGRYLLAYSGGRAQITVWENINYTL

SEQ ID NO: 8312 - protein, 14 aa, synthetic construct
  REGION 1..14: note = ATaRI peptide
VDLHTENEVKLHLK

SEQ ID NO: 8313 - protein, 34 aa, synthetic construct
  REGION 1..34: note = ATaRI peptide
SNIAHMYQVGSSFSVMLAKIDMISQKEIVSQVCC

SEQ ID NO: 8314 - protein, 27 aa, synthetic construct
  REGION 1..27: note = ATaRI peptide
LHKAIMVKGNVFPQNSSLLDISEWLFE

SEQ ID NO: 8315 - protein, 13 aa, synthetic construct
  REGION 1..13: note = ATaRI peptide
DELRAAMKVNRPI

SEQ ID NO: 8316 - protein, 23 aa, synthetic construct
  REGION 1..23: note = ATaRI peptide
KALTSKDMVSLTCKHHPQCVQSA

SEQ ID NO: 8317 - protein, 27 aa, synthetic construct
  REGION 1..27: note = ATaRI peptide
SFISMEPKVRRTSCVGTKRQSFCIFHW

SEQ ID NO: 8318 - protein, 47 aa, synthetic construct
  REGION 1..47: note = ATaRI peptide
KWPSMWYMVSLLRKPGLGPCHPVLCCMQRICWSWEDTEILTRDCFLF

SEQ ID NO: 8319 - protein, 14 aa, synthetic construct
  REGION 1..14: note = ATaRI peptide
HPDLMQNYVSVCCG

SEQ ID NO: 8320 - protein, 9 aa, synthetic construct
  REGION 1..9: note = ATaRI peptide
RYDASNENK

SEQ ID NO: 8321 - protein, 45 aa, synthetic construct
  REGION 1..45: note = ATaRI peptide
AFENGVRMVGFKSMEAYTVWMGDDSHMKNLWVSSCSLENWMELLG

SEQ ID NO: 8322 - protein, 47 aa, synthetic construct
  REGION 1..47: note = ATaRI peptide
GESYDKKIVRDMCMPIMICLFNVHFEIQRENHKHIYIYTHTHTHTQK

SEQ ID NO: 8323 - protein, 9 aa, synthetic construct
  REGION 1..9: note = ATaRI peptide
IIALALEAK

SEQ ID NO: 8324 - protein, 50 aa, synthetic construct
  REGION 1..50: note = ATaRI peptide
KTNAAGFKGENFFHILSQAKYFYFSPILNGEQETEPLKRNFKLCADKQRA

SEQ ID NO: 8325 - protein, 9 aa, synthetic construct
  REGION 1..9: note = ATaRI peptide
VESTDRQIK

SEQ ID NO: 8326 - protein, 18 aa, synthetic construct
  REGION 1..18: note = ATaRI peptide
TRSQLLANRYSSGLCPPV

SEQ ID NO: 8327 - protein, 20 aa, synthetic construct
  REGION 1..20: note = ATaRI peptide
QLRNFKTPGENSLSIHCSTV

SEQ ID NO: 8328 - protein, 34 aa, synthetic construct
  REGION 1..34: note = ATaRI peptide
FKVKVGHIGKPYSLLGYPPSWTCSQNNLPNISIM

SEQ ID NO: 8329 - protein, 14 aa, synthetic construct
  REGION 1..14: note = ATaRI peptide
AKQKVVDQGKENSK

SEQ ID NO: 8330 - protein, 22 aa, synthetic construct
  REGION 1..22: note = ATaRI peptide
IHIRYEDDVSILICDICFYIYM

SEQ ID NO: 8331 - protein, 13 aa, synthetic construct
  REGION 1..13: note = ATaRI peptide
IVPEGYDFGKYIL

SEQ ID NO: 8332 - protein, 11 aa, synthetic construct
  REGION 1..11: note = ATaRI peptide
GELLVSLEVSI

SEQ ID NO: 8333 - protein, 14 aa, synthetic construct
  REGION 1..14: note = ATaRI peptide
LLDLGHLKVYTNNI

SEQ ID NO: 8334 - protein, 23 aa, synthetic construct
  REGION 1..23: note = ATaRI peptide
ELPSVSEDGKMKLLKDIFLILLK

SEQ ID NO: 8335 - protein, 27 aa, synthetic construct
  REGION 1..27: note = ATaRI peptide
KGDVIKKLGMFFKNLASTFFFFNHVGQ

SEQ ID NO: 8336 - protein, 39 aa, synthetic construct
  REGION 1..39: note = ATaRI peptide
RPWNLGIKVYLYMSMCVYIYICILKDFIFLRTDLGSQQN

SEQ ID NO: 8337 - protein, 55 aa, synthetic construct
  REGION 1..55: note = ATaRI peptide
FNIPLGSYRYFVFIILFTLKSLVEFLVSDFTWITLIKSILLIAYLTYLGFSALRS

SEQ ID NO: 8338 - protein, 56 aa, synthetic construct
  REGION 1..56: note = ATaRI peptide
HGEVTQKDVSIGLLWCSQQPFLKKVFGPGAVAHACNPSTFGRLRWAMSWRSAWPIR

SEQ ID NO: 8339 - protein, 18 aa, synthetic construct
  REGION 1..18: note = ATaRI peptide
EVAYIGITRLDALNFGYI

SEQ ID NO: 8340 - protein, 10 aa, synthetic construct
  REGION 1..10: note = ATaRI peptide
AFFYEPYQVK

SEQ ID NO: 8341 - protein, 10 aa, synthetic construct
  REGION 1..10: note = ATaRI peptide
RRLRIEAKVC

SEQ ID NO: 8342 - protein, 9 aa, synthetic construct
  REGION 1..9: note = ATaRI peptide
TAERAKRHR

SEQ ID NO: 8343 - protein, 25 aa, synthetic construct
  REGION 1..25: note = ATaRI peptide
SIEQEALQVQSYHFKDMEKIISNSS

SEQ ID NO: 8344 - protein, 9 aa, synthetic construct
  REGION 1..9: note = ATaRI peptide
TSCLCVTFW

SEQ ID NO: 8345 - protein, 10 aa, synthetic construct
  REGION 1..10: note = ATaRI peptide
VIPFLSQEVR

SEQ ID NO: 8346 - protein, 9 aa, synthetic construct
  REGION 1..9: note = ATaRI peptide
AGPMVVHCR

SEQ ID NO: 8347 - protein, 9 aa, synthetic construct
  REGION 1..9: note = ATaRI peptide
LGELLHDKL

SEQ ID NO: 8348 - protein, 29 aa, synthetic construct
  REGION 1..29: note = ATaRI peptide
MDTCFCCLVRMEIRLLVNFKTVTYLNLVI

SEQ ID NO: 8349 - protein, 22 aa, synthetic construct
  REGION 1..22: note = ATaRI peptide
DDMQRRVKVYMFSVWCGVLVHF

SEQ ID NO: 8350 - protein, 15 aa, synthetic construct
  REGION 1..15: note = ATaRI peptide
RDPEVELEVIELIFW

SEQ ID NO: 8351 - protein, 28 aa, synthetic construct
  REGION 1..28: note = ATaRI peptide
LIAFTKKEVRAFNIICLFVLVILAGIPE

SEQ ID NO: 8352 - protein, 9 aa, synthetic construct
  REGION 1..9: note = ATaRI peptide
VSPPVLSPK

SEQ ID NO: 8353 - protein, 9 aa, synthetic construct
  REGION 1..9: note = ATaRI peptide
MHEYYYIYW

SEQ ID NO: 8354 - protein, 14 aa, synthetic construct
  REGION 1..14: note = ATaRI peptide
KKTKKKKKGAVDYF

SEQ ID NO: 8355 - protein, 14 aa, synthetic construct
  REGION 1..14: note = ATaRI peptide
NIPNPDHEVRLDSQ

SEQ ID NO: 8356 - protein, 15 aa, synthetic construct
  REGION 1..15: note = ATaRI peptide
GGHKKESKVSTLWEK

SEQ ID NO: 8357 - protein, 9 aa, synthetic construct
  REGION 1..9: note = ATaRI peptide
RRLLVKDPK

SEQ ID NO: 8358 - protein, 33 aa, synthetic construct
  REGION 1..33: note = ATaRI peptide
SLQHPWIKVSCILRNCLDHFLCDWFGHPGIHVS

SEQ ID NO: 8359 - protein, 62 aa, synthetic construct
  REGION 1..62: note = ATaRI peptide
YDVNQPNKVWFCSAAYWRGGSQRPCPSISKERPHLLLHSPFQLEAPYCGENHFCLESDLSYK

SEQ ID NO: 8360 - protein, 15 aa, synthetic construct
  REGION 1..15: note = ATaRI peptide
SRIDVQDKVIIVLLK

SEQ ID NO: 8361 - protein, 9 aa, synthetic construct
  REGION 1..9: note = ATaRI peptide
SLLKEIRNR

SEQ ID NO: 8362 - protein, 34 aa, synthetic construct
  REGION 1..34: note = ATaRI peptide
EIRSQIVSVSTPWKEPGPLCTSFLVCLWFQGTAS

SEQ ID NO: 8363 - protein, 18 aa, synthetic construct
  REGION 1..18: note = ATaRI peptide
VHYMIHEPGKLCYVIVKQ

SEQ ID NO: 8364 - protein, 74 aa, synthetic construct
  REGION 1..74: note = ATaRI peptide
VQEPPRIEVHLYFLFTWCDIISGSFLKETWVHIGFLSENLQGFLMIIFVVLKKTVATLLTSSFWLPSCLRAATQ

SEQ ID NO: 8365 - protein, 29 aa, synthetic construct
  REGION 1..29: note = ATaRI peptide
FQSKQQPQVIFRLKPQIALGLTLLAQLNA

SEQ ID NO: 8366 - protein, 16 aa, synthetic construct
  REGION 1..16: note = ATaRI peptide
KKPTSLKKVCGVFQPK

SEQ ID NO: 8367 - protein, 31 aa, synthetic construct
  REGION 1..31: note = ATaRI peptide
FPEQAELSGTNFSLCLKNNLNESNYEKDELC

SEQ ID NO: 8368 - protein, 9 aa, synthetic construct
  REGION 1..9: note = ATaRI peptide
KKGYYQMKK

SEQ ID NO: 8369 - protein, 47 aa, synthetic construct
  REGION 1..47: note = ATaRI peptide
EWEIPEIICKFYTVSHSECCDEISPIPLHPAWDCCQSLSSPLGYQTP

SEQ ID NO: 8370 - protein, 60 aa, synthetic construct
  REGION 1..60: note = ATaRI peptide
VSDVENYVGKRHPLHSALGLELGVLGHPPLCMLFPHALAVSMCAVSSGASRLTVLCSRCS

SEQ ID NO: 8371 - protein, 55 aa, synthetic construct
  REGION 1..55: note = ATaRI peptide
GQTLFIPSGECGQLWGPCTRACRPSSSLLPCPLDRVPTMGSLRHPWHACSLVLSI

SEQ ID NO: 8372 - protein, 66 aa, synthetic construct
  REGION 1..66: note = ATaRI peptide
KHLLEAFKGTGHSGVGVQAWGSWLWGQPDLVRADCLGVSAAFLWPEQVLLGLRPLGLSFPICIMQD

SEQ ID NO: 8373 - protein, 62 aa, synthetic construct
  REGION 1..62: note = ATaRI peptide
AKEIRLSEVGPCPGAGLDPWGLGRAHLSFSGSRGQPNTELPGLGRPVPQMVLLALSWASLPL

SEQ ID NO: 8374 - protein, 72 aa, synthetic construct
  REGION 1..72: note = ATaRI peptide
SFSNKKLLGYVSAWMGGVTSRITDITHTIHTASHPLPYTTHTLHTHYACTLHLTHTTHCITHNHTHCTSRTP

SEQ ID NO: 8375 - protein, 92 aa, synthetic construct
  REGION 1..92: note = ATaRI peptide
ACFKDSDYGECHSCVGQGPCSALEGLAENGDSSINMQLSKLQQASAQQNPRPLTAVPGDPPVSETGRGPHLVDRLGLRGGAYSSLTNRMTAK

SEQ ID NO: 8376 - protein, 9 aa, synthetic construct
  REGION 1..9: note = ATaRI peptide
AIKGVYSSW

SEQ ID NO: 8377 - protein, 9 aa, synthetic construct
  REGION 1..9: note = ATaRI peptide
IPLMRISPW

SEQ ID NO: 8378 - protein, 37 aa, synthetic construct
  REGION 1..37: note = ATaRI peptide
WKQADPFAVNKNMEIFTFLNVFLSQANESMYVQPQGS

SEQ ID NO: 8379 - protein, 26 aa, synthetic construct
  REGION 1..26: note = ATaRI peptide
RNAESDQQGEVTAPHLFFSFNGRPPC

SEQ ID NO: 8380 - protein, 19 aa, synthetic construct
  REGION 1..19: note = ATaRI peptide
MVLLQDPQGELGLTLPTSE

SEQ ID NO: 8381 - protein, 15 aa, synthetic construct
  REGION 1..15: note = ATaRI peptide
PGGGLQAPGTRGQRG

SEQ ID NO: 8382 - protein, 42 aa, synthetic construct
  REGION 1..42: note = ATaRI peptide
TAEKFPDEKYVLQSSAGRVGNQKGFEKMLLSFSFLSFFFFFF

SEQ ID NO: 8383 - protein, 21 aa, synthetic construct
  REGION 1..21: note = ATaRI peptide
TWGSGKDTRYGVSVCPLRTCN

SEQ ID NO: 8384 - protein, 15 aa, synthetic construct
  REGION 1..15: note = ATaRI peptide
HKSKYRDDVSIAFRM

SEQ ID NO: 8385 - protein, 11 aa, synthetic construct
  REGION 1..11: note = ATaRI peptide
IETSRSGEVRR

SEQ ID NO: 8386 - protein, 43 aa, synthetic construct
  REGION 1..43: note = ATaRI peptide
KTMPFFLEGRSFLHAKIFRAVYEYIIIGNYGNIVCIMINTCIC

SEQ ID NO: 8387 - protein, 15 aa, synthetic construct
  REGION 1..15: note = ATaRI peptide
RTSTKEMSGMFSKHF

SEQ ID NO: 8388 - protein, 9 aa, synthetic construct
  REGION 1..9: note = ATaRI peptide
IEDYFHCKV

SEQ ID NO: 8389 - protein, 16 aa, synthetic construct
  REGION 1..16: note = ATaRI peptide
KGKWLRVEVKISHLAF

SEQ ID NO: 8390 - protein, 14 aa, synthetic construct
  REGION 1..14: note = ATaRI peptide
QAVTAQLAGNFCGI

SEQ ID NO: 8391 - protein, 53 aa, synthetic construct
  REGION 1..53: note = ATaRI peptide
KILRLLCTVYVCKRFMNPGDNVLSTLKCFGKCSKYMFMFYMSLALLLWGNLYK

SEQ ID NO: 8392 - protein, 10 aa, synthetic construct
  REGION 1..10: note = ATaRI peptide
NYNEAVYLVS

SEQ ID NO: 8393 - protein, 9 aa, synthetic construct
  REGION 1..9: note = ATaRI peptide
FANTESYLK

SEQ ID NO: 8394 - protein, 9 aa, synthetic construct
  REGION 1..9: note = ATaRI peptide
REVLEKCMR

SEQ ID NO: 8395 - protein, 10 aa, synthetic construct
  REGION 1..10: note = ATaRI peptide
YKYGDESSSK

SEQ ID NO: 8396 - protein, 11 aa, synthetic construct
  REGION 1..11: note = ATaRI peptide
SHSFSALAKYV

SEQ ID NO: 8397 - protein, 16 aa, synthetic construct
  REGION 1..16: note = ATaRI peptide
KKFDKKVKGRWPHFIS

SEQ ID NO: 8398 - protein, 18 aa, synthetic construct
  REGION 1..18: note = ATaRI peptide
IGKVVHQPGKVSFSKISI

SEQ ID NO: 8399 - protein, 87 aa, synthetic construct
  REGION 1..87: note = ATaRI peptide
DRPGFFGMVSEGGGPTAGRDFPGLWVCSANPGQERPRHGEHWLPPLPPACPPPTTFLSTALLSPCERLGRRCRMSELEAISKLTTIL

SEQ ID NO: 8400 - protein, 16 aa, synthetic construct
  REGION 1..16: note = ATaRI peptide
FPGLKGEQVRGAQVSE

SEQ ID NO: 8401 - protein, 9 aa, synthetic construct
  REGION 1..9: note = ATaRI peptide
GPPAILGAG

SEQ ID NO: 8402 - protein, 31 aa, synthetic construct
  REGION 1..31: note = ATaRI peptide
SANYEKPAVSTIYTFNLQILSVYLLSARSHA

SEQ ID NO: 8403 - protein, 34 aa, synthetic construct
  REGION 1..34: note = ATaRI peptide
IARRCSIGGKLLSSPPVVCHEQKLFKNCLLFLIE

SEQ ID NO: 8404 - protein, 13 aa, synthetic construct
  REGION 1..13: note = ATaRI peptide
PNRWQSCEVSISF

SEQ ID NO: 8405 - protein, 42 aa, synthetic construct
  REGION 1..42: note = ATaRI peptide
KERRDLMHVSCLPAHVFYFKMFLIYLCITCYIVIVYITYMCI

SEQ ID NO: 8406 - protein, 9 aa, synthetic construct
  REGION 1..9: note = ATaRI peptide
DPQIHVGLL

SEQ ID NO: 8407 - protein, 9 aa, synthetic construct
  REGION 1..9: note = ATaRI peptide
LAVKEDCKV

SEQ ID NO: 8408 - protein, 9 aa, synthetic construct
  REGION 1..9: note = ATaRI peptide
EQAEAISER

SEQ ID NO: 8409 - protein, 48 aa, synthetic construct
  REGION 1..48: note = ATaRI peptide
ARSQYVCRVSWNPFVTCLECFVFHPLCDFFFLLFILKGICICTNNTNP

SEQ ID NO: 8410 - protein, 25 aa, synthetic construct
  REGION 1..25: note = ATaRI peptide
LTDEKLKQVCKENTDYLPIKNTTIL

SEQ ID NO: 8411 - protein, 34 aa, synthetic construct
  REGION 1..34: note = ATaRI peptide
AERIRDSKVKRLINTKLYLSILTLVLLHINFLKS

SEQ ID NO: 8412 - protein, 9 aa, synthetic construct
  REGION 1..9: note = ATaRI peptide
QIKLISTMG

SEQ ID NO: 8413 - protein, 21 aa, synthetic construct
  REGION 1..21: note = ATaRI peptide
EIFENIYPSKRFLIFLYYVWK

SEQ ID NO: 8414 - protein, 9 aa, synthetic construct
  REGION 1..9: note = ATaRI peptide
ILQGPHANP

SEQ ID NO: 8415 - protein, 18 aa, synthetic construct
  REGION 1..18: note = ATaRI peptide
GHFEVTILGKFTVLFAYH

SEQ ID NO: 8416 - protein, 27 aa, synthetic construct
  REGION 1..27: note = ATaRI peptide
LPGPRAVAGKTISVFFSLRKKKNYKQP

SEQ ID NO: 8417 - protein, 9 aa, synthetic construct
  REGION 1..9: note = ATaRI peptide
DSSVLQFSR

SEQ ID NO: 8418 - protein, 38 aa, synthetic construct
  REGION 1..38: note = ATaRI peptide
DSRVAGTTGKCHHTWVIIYYYYYYFCREGVPLCCPGCP

SEQ ID NO: 8419 - protein, 10 aa, synthetic construct
  REGION 1..10: note = ATaRI peptide
YRRKFSPIGR

SEQ ID NO: 8420 - protein, 24 aa, synthetic construct
  REGION 1..24: note = ATaRI peptide
SVLQILGLVSLVISPSIPSVCSSP

SEQ ID NO: 8421 - protein, 14 aa, synthetic construct
  REGION 1..14: note = ATaRI peptide
PMHEGKMKGNRPFA

SEQ ID NO: 8422 - protein, 15 aa, synthetic construct
  REGION 1..15: note = ATaRI peptide
LERLGDPKVRSNMGV

SEQ ID NO: 8423 - protein, 9 aa, synthetic construct
  REGION 1..9: note = ATaRI peptide
IRALSLIYK

SEQ ID NO: 8424 - protein, 9 aa, synthetic construct
  REGION 1..9: note = ATaRI peptide
DYKSSNQNR

SEQ ID NO: 8425 - protein, 9 aa, synthetic construct
  REGION 1..9: note = ATaRI peptide
NKGTEETKV

SEQ ID NO: 8426 - protein, 16 aa, synthetic construct
  REGION 1..16: note = ATaRI peptide
YYLGDKCQVSSFFKNQ

SEQ ID NO: 8427 - protein, 9 aa, synthetic construct
  REGION 1..9: note = ATaRI peptide
VFIEELAEK

SEQ ID NO: 8428 - protein, 42 aa, synthetic construct
  REGION 1..42: note = ATaRI peptide
PGGYVPEIGLYAKGCYFVFPFLYLLLLTCIVLFFKCMSYVLL

SEQ ID NO: 8429 - protein, 28 aa, synthetic construct
  REGION 1..28: note = ATaRI peptide
ETAYPTLPVSGSMLYSKSCLLFSFIFLK

SEQ ID NO: 8430 - protein, 25 aa, synthetic construct
  REGION 1..25: note = ATaRI peptide
TSYNYPQKVILIVLLSSYNGLNTEK

SEQ ID NO: 8431 - protein, 26 aa, synthetic construct
  REGION 1..26: note = ATaRI peptide
IQAEASANGECVMRLPARKTVGFYCV

SEQ ID NO: 8432 - protein, 33 aa, synthetic construct
  REGION 1..33: note = ATaRI peptide
EGTQHSYSGNHFICNRLTQCAKWDGCCNVKDGL

SEQ ID NO: 8433 - protein, 16 aa, synthetic construct
  REGION 1..16: note = ATaRI peptide
KLTPFIIQVCIVLPSL

SEQ ID NO: 8434 - protein, 11 aa, synthetic construct
  REGION 1..11: note = ATaRI peptide
TLKTPDIDGKY

SEQ ID NO: 8435 - protein, 17 aa, synthetic construct
  REGION 1..17: note = ATaRI peptide
GDKIVTAQVGELVFCFI

SEQ ID NO: 8436 - protein, 29 aa, synthetic construct
  REGION 1..29: note = ATaRI peptide
MRRTKEYVRYGLMLLFVISSISELLRFLC

SEQ ID NO: 8437 - protein, 9 aa, synthetic construct
  REGION 1..9: note = ATaRI peptide
DGGRLKQKT

SEQ ID NO: 8438 - protein, 15 aa, synthetic construct
  REGION 1..15: note = ATaRI peptide
QDLSGEHMVSNFFIF

SEQ ID NO: 8439 - protein, 25 aa, synthetic construct
  REGION 1..25: note = ATaRI peptide
MRMKYNTEGIFHLFKNLQKPEVFTF

SEQ ID NO: 8440 - protein, 9 aa, synthetic construct
  REGION 1..9: note = ATaRI peptide
SSQIKASFR

SEQ ID NO: 8441 - protein, 22 aa, synthetic construct
  REGION 1..22: note = ATaRI peptide
EVLDATPSGKSLLVLYFFLVST

SEQ ID NO: 8442 - protein, 61 aa, synthetic construct
  REGION 1..61: note = ATaRI peptide
GLELLASKRLVLLWPKYWDYRHETSYLAFFSFLFFFPQCYLFTFHILPLHIPQEILAFKTI

SEQ ID NO: 8443 - protein, 9 aa, synthetic construct
  REGION 1..9: note = ATaRI peptide
SGDFRMLPW

SEQ ID NO: 8444 - protein, 21 aa, synthetic construct
  REGION 1..21: note = ATaRI peptide
ECVPVDLSSKNILQINLKHNV

SEQ ID NO: 8445 - protein, 11 aa, synthetic construct
  REGION 1..11: note = ATaRI peptide
ESDASALKVCL

SEQ ID NO: 8446 - protein, 73 aa, synthetic construct
  REGION 1..73: note = ATaRI peptide
YSLASFLKVSSRQLECGKELLFIDRKPKKKIKHFLEAQLGLHKTVGKLRLLTNVGYCEQCCNKHGSVDISLMH

SEQ ID NO: 8447 - protein, 27 aa, synthetic construct
  REGION 1..27: note = ATaRI peptide
AVDRLTSVGRFNSVHSKLACCFRKQLI

SEQ ID NO: 8448 - protein, 48 aa, synthetic construct
  REGION 1..48: note = ATaRI peptide
SCAAMPNSVSSNVFLLEFYPILLNAFGIGVICYMISTLRVHFFFFFFF

SEQ ID NO: 8449 - protein, 9 aa, synthetic construct
  REGION 1..9: note = ATaRI peptide
LINILILLE

SEQ ID NO: 8450 - protein, 14 aa, synthetic construct
  REGION 1..14: note = ATaRI peptide
ANSDRPMKVCSHFR

SEQ ID NO: 8451 - protein, 37 aa, synthetic construct
  REGION 1..37: note = ATaRI peptide
VAEFLHRKSKIFLFLEMGGFSFSIIVFYLCSLAMNMI

SEQ ID NO: 8452 - protein, 25 aa, synthetic construct
  REGION 1..25: note = ATaRI peptide
YEKRREFEVGNLNIFIIDLCILFWF

SEQ ID NO: 8453 - protein, 20 aa, synthetic construct
  REGION 1..20: note = ATaRI peptide
KIIQDSDKVTHTLHVEIIIC

SEQ ID NO: 8454 - protein, 11 aa, synthetic construct
  REGION 1..11: note = ATaRI peptide
EKCISPPEGNN

SEQ ID NO: 8455 - protein, 10 aa, synthetic construct
  REGION 1..10: note = ATaRI peptide
RARCEAQRVS

SEQ ID NO: 8456 - protein, 40 aa, synthetic construct
  REGION 1..40: note = ATaRI peptide
HNLPRLLQVKLNSPSSLVTLRLAVLWANVGSEPSLSYFGS

SEQ ID NO: 8457 - protein, 27 aa, synthetic construct
  REGION 1..27: note = ATaRI peptide
LCKDGLSQVNQYFFLVWFKSVFLSCFV

SEQ ID NO: 8458 - protein, 24 aa, synthetic construct
  REGION 1..24: note = ATaRI peptide
EEEMEELSKYVYAYFCFVSLIPAQ

SEQ ID NO: 8459 - protein, 33 aa, synthetic construct
  REGION 1..33: note = ATaRI peptide
RGVSLTVVGKMDLFTLSKKRLCSLKLQMYCIPL

SEQ ID NO: 8460 - protein, 54 aa, synthetic construct
  REGION 1..54: note = ATaRI peptide
PTLRLLHKCKVFLFLFFEILLLLQYSNVKSCKKYAFNQIRHCWGRKTEICIWEY

SEQ ID NO: 8461 - protein, 9 aa, synthetic construct
  REGION 1..9: note = ATaRI peptide
VMKMSAEDM

SEQ ID NO: 8462 - protein, 9 aa, synthetic construct
  REGION 1..9: note = ATaRI peptide
EQHAKWYPG

SEQ ID NO: 8463 - protein, 37 aa, synthetic construct
  REGION 1..37: note = ATaRI peptide
NQKQGKGKVCIKYLTLFCFLRSHTHTDLSYVSDSFIF

SEQ ID NO: 8464 - protein, 29 aa, synthetic construct
  REGION 1..29: note = ATaRI peptide
FRHTSTLAGRYLEIFSAYCLRFEMKKILI

SEQ ID NO: 8465 - protein, 27 aa, synthetic construct
  REGION 1..27: note = ATaRI peptide
LLLQKRKEVNFYIEYLGYCVTNLVTIN

SEQ ID NO: 8466 - protein, 9 aa, synthetic construct
  REGION 1..9: note = ATaRI peptide
KGVFVHRYR

SEQ ID NO: 8467 - protein, 39 aa, synthetic construct
  REGION 1..39: note = ATaRI peptide
VGWTMHDKVRCALQTASFYTSAWLSAPLIHELSPSMYTW

SEQ ID NO: 8468 - protein, 9 aa, synthetic construct
  REGION 1..9: note = ATaRI peptide
IKLLTLVLQ

SEQ ID NO: 8469 - protein, 9 aa, synthetic construct
  REGION 1..9: note = ATaRI peptide
AAGEFLYKK

SEQ ID NO: 8470 - protein, 37 aa, synthetic construct
  REGION 1..37: note = ATaRI peptide
LLEDFLQEVYIITITSILSVEPLYCSKLISHPSVKSW

SEQ ID NO: 8471 - protein, 15 aa, synthetic construct
  REGION 1..15: note = ATaRI peptide
VNTTVKEQVSNYYRW

SEQ ID NO: 8472 - protein, 14 aa, synthetic construct
  REGION 1..14: note = ATaRI peptide
DIFKQYMKVKLKNG

SEQ ID NO: 8473 - protein, 9 aa, synthetic construct
  REGION 1..9: note = ATaRI peptide
REAIAMLHK

SEQ ID NO: 8474 - protein, 45 aa, synthetic construct
  REGION 1..45: note = ATaRI peptide
LLRQDKRTVYVFAGNVLFNFILGFLRAIFILGFSPFYSHRIVGLH

SEQ ID NO: 8475 - protein, 20 aa, synthetic construct
  REGION 1..20: note = ATaRI peptide
VEGMQLSLSKDIIYSLYIYP

SEQ ID NO: 8476 - protein, 26 aa, synthetic construct
  REGION 1..26: note = ATaRI peptide
MKHCTKIQVLSIHQRQPSSQAPTLDP

SEQ ID NO: 8477 - protein, 29 aa, synthetic construct
  REGION 1..29: note = ATaRI peptide
NSHFRCVQGTSFNSLASFIMFFLGHYCIM

SEQ ID NO: 8478 - protein, 19 aa, synthetic construct
  REGION 1..19: note = ATaRI peptide
LKNIHGMEVIGELKAISDK

SEQ ID NO: 8479 - protein, 36 aa, synthetic construct
  REGION 1..36: note = ATaRI peptide
EYVNIQTFRLVSLLLPESKKLVYITDSGLLIFKTLA

SEQ ID NO: 8480 - protein, 9 aa, synthetic construct
  REGION 1..9: note = ATaRI peptide
PQLNIMKHE

SEQ ID NO: 8481 - protein, 9 aa, synthetic construct
  REGION 1..9: note = ATaRI peptide
SKTDRWDSR

SEQ ID NO: 8482 - protein, 20 aa, synthetic construct
  REGION 1..20: note = ATaRI peptide
VSALFHIGVNTCLYIHLFVC

SEQ ID NO: 8483 - protein, 34 aa, synthetic construct
  REGION 1..34: note = ATaRI peptide
LFKYACHQVSESRPSLQLWKVCNYYRKSQHLTSA

SEQ ID NO: 8484 - protein, 37 aa, synthetic construct
  REGION 1..37: note = ATaRI peptide
CLFCFSCPRYNFGVPVSVGGRKLAGPSPFLLGLAPAT

SEQ ID NO: 8485 - protein, 29 aa, synthetic construct
  REGION 1..29: note = ATaRI peptide
VRSSHRPKVSAELRSRVGPRCRWSTSCHG

SEQ ID NO: 8486 - protein, 60 aa, synthetic construct
  REGION 1..60: note = ATaRI peptide
KRADSHEEGRPRGPGPLGWAAEGSPGHSGEGRGAQALTPSLWKSETSSLWKEDMIDPSEV

SEQ ID NO: 8487 - protein, 10 aa, synthetic construct
  REGION 1..10: note = ATaRI peptide
STRTRSQSGE

SEQ ID NO: 8488 - protein, 16 aa, synthetic construct
  REGION 1..16: note = ATaRI peptide
ATVSEEAKVCSYQGVL

SEQ ID NO: 8489 - protein, 21 aa, synthetic construct
  REGION 1..21: note = ATaRI peptide
RAARLGYKVREFSTDHRAPLV

SEQ ID NO: 8490 - protein, 16 aa, synthetic construct
  REGION 1..16: note = ATaRI peptide
NGGRDCKRSKQTPPLY

SEQ ID NO: 8491 - protein, 24 aa, synthetic construct
  REGION 1..24: note = ATaRI peptide
GTVDGILKVSTLWIWVTIWLSLMS

SEQ ID NO: 8492 - protein, 21 aa, synthetic construct
  REGION 1..21: note = ATaRI peptide
EIKRGTKLVSWYFCLLRIKII

SEQ ID NO: 8493 - protein, 39 aa, synthetic construct
  REGION 1..39: note = ATaRI peptide
NEYFRDLNVSNCFFFSLIFQNTHKNLGKRIVFSFQHLII

SEQ ID NO: 8494 - protein, 21 aa, synthetic construct
  REGION 1..21: note = ATaRI peptide
PGQPPHPGGEGCLCPAAPTGK

SEQ ID NO: 8495 - protein, 27 aa, synthetic construct
  REGION 1..27: note = ATaRI peptide
PDPLPIGEGIVDNFFNPKVLYRRMRRH

SEQ ID NO: 8496 - protein, 13 aa, synthetic construct
  REGION 1..13: note = ATaRI peptide
PDQNLPSLVSVIK

SEQ ID NO: 8497 - protein, 14 aa, synthetic construct
  REGION 1..14: note = ATaRI peptide
KSPHTCWQVLILTY

SEQ ID NO: 8498 - protein, 22 aa, synthetic construct
  REGION 1..22: note = ATaRI peptide
FQIGLLNKVNCDINSLYLFELV

SEQ ID NO: 8499 - protein, 32 aa, synthetic construct
  REGION 1..32: note = ATaRI peptide
NPFKQDKKVGYLCLCLPKLGYSCYIIIFFLAR

SEQ ID NO: 8500 - protein, 11 aa, synthetic construct
  REGION 1..11: note = ATaRI peptide
QDNEMLRKVSS

SEQ ID NO: 8501 - protein, 24 aa, synthetic construct
  REGION 1..24: note = ATaRI peptide
DCYFFLNYVSTCPISIILPLLACS

SEQ ID NO: 8502 - protein, 13 aa, synthetic construct
  REGION 1..13: note = ATaRI peptide
ESQHRTKQVRGTL

SEQ ID NO: 8503 - protein, 9 aa, synthetic construct
  REGION 1..9: note = ATaRI peptide
AMLSCLHIR

SEQ ID NO: 8504 - protein, 31 aa, synthetic construct
  REGION 1..31: note = ATaRI peptide
SLAAPRGPVSAHPTNSPSLPPGGHFDVMALT

SEQ ID NO: 8505 - protein, 22 aa, synthetic construct
  REGION 1..22: note = ATaRI peptide
KKKLSMQQKFVIFFPFERFHIF

SEQ ID NO: 8506 - protein, 78 aa, synthetic construct [sequence omitted]

SEQ ID NO: 8507 - protein, 50 aa, synthetic construct
  REGION 1..50: note = ATaRI peptide
LGPSLLLNGNLQEDKFIIHKMYYMTMPLSVFLIQLETYYLLIIKQCCSVV

SEQ ID NO: 8508 - protein, 9 aa, synthetic construct
  REGION 1..9: note = ATaRI peptide
KQRVEAFEL

SEQ ID NO: 8509 - protein, 9 aa, synthetic construct
  REGION 1..9: note = ATaRI peptide
RKLKNELLK

SEQ ID NO: 8510 - protein, 16 aa, synthetic construct
  REGION 1..16: note = ATaRI peptide
VNRVKELEVIVKHVGF

SEQ ID NO: 8511 - protein, 23 aa, synthetic construct
  REGION 1..23: note = ATaRI peptide
LESEMYLEGKPPAQRVAGCSGVG

SEQ ID NO: 8512 - protein, 9 aa, synthetic construct
  REGION 1..9: note = ATaRI peptide
SSPPEQKVG

SEQ ID NO: 8513 - protein, 63 aa, synthetic construct
  REGION 1..63: note = ATaRI peptide
EEFESSFECKFKYKYQFLYVENLESLVLVKRIHWFKKKSSYKLGHYYFVIQPQVQMYHLIFLP

SEQ ID NO: 8514 - protein, 13 aa, synthetic construct
  REGION 1..13: note = ATaRI peptide
VPLSYQHPSKFFF

SEQ ID NO: 8515 - protein, 9 aa, synthetic construct
  REGION 1..9: note = ATaRI peptide
DVPEDLRQM

SEQ ID NO: 8516 - protein, 19 aa, synthetic construct
  REGION 1..19: note = ATaRI peptide
EKNVPQEEVCYSANILWHI

SEQ ID NO: 8517 - protein, 12 aa, synthetic construct
  REGION 1..12: note = ATaRI peptide
YDKEGNKLCKYI

SEQ ID NO: 8518 - protein, 45 aa, synthetic construct
  REGION 1..45: note = ATaRI peptide
SETGINSIVSIFSFIPNQCLSWLPPFLLSLLPTTYCCKIEVTNLY

SEQ ID NO: 8519 - protein, 10 aa, synthetic construct
  REGION 1..10: note = ATaRI peptide
KVYYPKYLCK

SEQ ID NO: 8520 - protein, 9 aa, synthetic construct
  REGION 1..9: note = ATaRI peptide
FKGPLLHIR

SEQ ID NO: 8521 - protein, 9 aa, synthetic construct
  REGION 1..9: note = ATaRI peptide
PRNKVMEHR

SEQ ID NO: 8522 - protein, 25 aa, synthetic construct
  REGION 1..25: note = ATaRI peptide
TSEDICLQVSILSSYPNKVVNADQH

SEQ ID NO: 8523 - protein, 11 aa, synthetic construct
  REGION 1..11: note = ATaRI peptide
PVEEYRRQVRC

SEQ ID NO: 8524 - protein, 31 aa, synthetic construct
  REGION 1..31: note = ATaRI peptide
FRSRNRIPVSTAINVSLEEHLLVHKNGSHIT

SEQ ID NO: 8525 - protein, 32 aa, synthetic construct
  REGION 1..32: note = ATaRI peptide
THWLEHIKASIFCENICVYKKECNCLVEWTYF

SEQ ID NO: 8526 - protein, 10 aa, synthetic construct
  REGION 1..10: note = ATaRI peptide
CESARERQVS

SEQ ID NO: 8527 - protein, 24 aa, synthetic construct
  REGION 1..24: note = ATaRI peptide
WNPRIKQQVSEVALLKDSNVNCLP

SEQ ID NO: 8528 - protein, 9 aa, synthetic construct
  REGION 1..9: note = ATaRI peptide
QPSVETLDR

SEQ ID NO: 8529 - protein, 19 aa, synthetic construct
  REGION 1..19: note = ATaRI peptide
IHKARQRLVMCMHLTDIEN

SEQ ID NO: 8530 - protein, 62 aa, synthetic construct
  REGION 1..62: note = ATaRI peptide
FRAKGRVPVSNKHCHLYRNIYCVRSNMERFKTKKKLVNKNGKQKNKLINLNIPLILNKYLII

SEQ ID NO: 8531 - protein, 26 aa, synthetic construct
  REGION 1..26: note = ATaRI peptide
SFGHRFALVSSDSEVYAGLFCGIIWM

SEQ ID NO: 8532 - protein, 17 aa, synthetic construct
  REGION 1..17: note = ATaRI peptide
CVWQMTRQVRDFKYISI

SEQ ID NO: 8533 - protein, 17 aa, synthetic construct
  REGION 1..17: note = ATaRI peptide
WNPRMRPQVSFCFSFHE

SEQ ID NO: 8534 - protein, 60 aa, synthetic construct
  REGION 1..60: note = ATaRI peptide
LGDLCSRQVMDHAALLISHEPTKGNHDTSLAQKPANLFEKQLFHCENFQSYRKEHHILTA

SEQ ID NO: 8535 - protein, 14 aa, synthetic construct
  REGION 1..14: note = ATaRI peptide
TCKEAGVQVRGRLE

SEQ ID NO: 8536 - protein, 16 aa, synthetic construct
  REGION 1..16: note = ATaRI peptide
ETKILQERVCTLELVE

SEQ ID NO: 8537 - protein, 42 aa, synthetic construct
  REGION 1..42: note = ATaRI peptide
IAFYGGHEVGQVGVPGTEGSVWQGGPGAGSRERWGQSGAGRG

SEQ ID NO: 8538 - protein, 61 aa, synthetic construct
  REGION 1..61: note = ATaRI peptide
YEEEMEREGEGWLESEPRPQPLGRGPQCERLSAKLMPCQDGSKSCPLEAPRTVDRGGKRLV

SEQ ID NO: 8539 - protein, 51 aa, synthetic construct
  REGION 1..51: note = ATaRI peptide
LEENQELRGEERVRGSSPAEGKASSPHLHLCVSWAWGGDVLPSLLVSGSRL

SEQ ID NO: 8540 - protein, 9 aa, synthetic construct
  REGION 1..9: note = ATaRI peptide
ERQAASEEK

SEQ ID NO: 8541 - protein, 33 aa, synthetic construct
  REGION 1..33: note = ATaRI peptide
VVGSERKRVSATTGALGLALPLPLPVALNLENG

SEQ ID NO: 8542 - protein, 126 aa, synthetic construct
  REGION 1..126: note = ATaRI peptide
QGNMADAEGKGCRLPGRANSGRLGERGWGDGIGARARLPLVPAGVSASSPPGLKPALSLGPGSVARAREWEPLAVTWHDGARPSHLPGVRVAVERHLPCCPPRGGVGRGSVCAAASPDAAVTAPCD

SEQ ID NO: 8543 - protein, 18 aa, synthetic construct
  REGION 1..18: note = ATaRI peptide
TKGEAICMGKRGCLFFKF

SEQ ID NO: 8544 - protein, 26 aa, synthetic construct
  REGION 1..26: note = ATaRI peptide
FFQNGKVKVSWSPWKERKKEKKYHLS

SEQ ID NO: 8545 - protein, 9 aa, synthetic construct
  REGION 1..9: note = ATaRI peptide
WGFLRPCLW

SEQ ID NO: 8546 - protein, 16 aa, synthetic construct
  REGION 1..16: note = ATaRI peptide
DKVCLWLGVSKCYSHS

SEQ ID NO: 8547 - protein, 12 aa, synthetic construct
  REGION 1..12: note = ATaRI peptide
DQFTTTEVSILS

SEQ ID NO: 8548 - protein, 65 aa, synthetic construct
  REGION 1..65: note = ATaRI peptide
PVEVDHDQVCSLHNFNLRKSLSAHVKQGWAQTVASVLTSCNAYTFLLKCTNVLSQFGHEFGDVSN

SEQ ID NO: 8549 - protein, 19 aa, synthetic construct
  REGION 1..19: note = ATaRI peptide
ELARLRDSGDGLFILFSVL

SEQ ID NO: 8550 - protein, 51 aa, synthetic construct
  REGION 1..51: note = ATaRI peptide
EEKLLERERSVLIETLKVNEVILLEYYQPLLTSTSLLYKILYQIGLIKYPV

SEQ ID NO: 8551 - protein, 17 aa, synthetic construct
  REGION 1..17: note = ATaRI peptide
RQEKKEKEVIPVMGCAV

SEQ ID NO: 8552 - protein, 9 aa, synthetic construct
  REGION 1..9: note = ATaRI peptide
TGACRFGDR

SEQ ID NO: 8553 - protein, 41 aa, synthetic construct
  REGION 1..41: note = ATaRI peptide
VGKVIQFKVGMRVEEGTGLLHPAVLNGTRELGHRLSWGQAR

SEQ ID NO: 8554 - protein, 63 aa, synthetic construct
  REGION 1..63: note = ATaRI peptide
TRWKMAICGKRQSDDFFPQLFHCYIKGYSLGETQYFQVVRHSFLPHTVDEQRTLYKEHHSLDL

SEQ ID NO: 8555 - protein, 9 aa, synthetic construct
  REGION 1..9: note = ATaRI peptide
MRFALVPKL

SEQ ID NO: 8556 - protein, 105 aa, synthetic construct
  REGION 1..105: note = ATaRI peptide
REQDLPLAGIFWVEDSTLQKKLFLETQMSLTSYTYQKCHCLREKFFSSQRKSSFFSYCLLSDPAHTCLPQAFLYFAYLLSHSLFSFLFFFLDTGLTMLPRLSSNS

SEQ ID NO: 8557 - protein, 23 aa, synthetic construct
  REGION 1..23: note = ATaRI peptide
QEETAVLEGKKQNKSKQRNYSSP

SEQ ID NO: 8558 - protein, 25 aa, synthetic construct
  REGION 1..25: note = ATaRI peptide
QRHNKTLKVSCFICLFFSGGTYLIS

SEQ ID NO: 8559 - protein, 29 aa, synthetic construct
  REGION 1..29: note = ATaRI peptide
EQYALREEVMAFGLFKRLLKISKSVTIHT

SEQ ID NO: 8560 - protein, 13 aa, synthetic construct
  REGION 1..13: note = ATaRI peptide
KHQREREFVSSTS

SEQ ID NO: 8561 - protein, 46 aa, synthetic construct
  REGION 1..46: note = ATaRI peptide
LPAETLHQVGPSASCPCGSVGQCVRGRRLRVGRQGCPQGPGGLGQF

SEQ ID NO: 8562 - protein, 30 aa, synthetic construct
  REGION 1..30: note = ATaRI peptide
VRIESIKCGEYLTFVCFIVHGESLIYENHF

SEQ ID NO: 8563 - protein, 22 aa, synthetic construct
  REGION 1..22: note = ATaRI peptide
SSAEQMHPGKRRPGGQLSQAVS

SEQ ID NO: 8564 - protein, 22 aa, synthetic construct
  REGION 1..22: note = ATaRI peptide
PDPSSFISGKNVGSLGITLTRT

SEQ ID NO: 8565 - protein, 9 aa, synthetic construct
  REGION 1..9: note = ATaRI peptide
SIPELSYIW

SEQ ID NO: 8566 - protein, 44 aa, synthetic construct
  REGION 1..44: note = ATaRI peptide
LQPEYLQAGKASPSTVNLKYFSSRLCKKLLFPDFLMIAILTGVR

SEQ ID NO: 8567 - protein, 80 aa, synthetic construct
  REGION 1..80: note = ATaRI peptide
PRDLNRMEVKDLHMLINKDVYGAKSIGLCSLQILENELFFCLKMSFYNISFSYLVIINTLMLSLSDLDTRCIYNFFPFSP

SEQ ID NO: 8568 - protein, 17 aa, synthetic construct
  REGION 1..17: note = ATaRI peptide
DVTSDDKQGRRRMSFLL

SEQ ID NO: 8569 - protein, 24 aa, synthetic construct
  REGION 1..24: note = ATaRI peptide
PKDVSEDPGRRKPFLYTLYIIILK

SEQ ID NO: 8570 - protein, 41 aa, synthetic construct
  REGION 1..41: note = ATaRI peptide
PPRPCPSQVGDIFDLCKLFGGREVVLSLCFFARVDRHRSGP

SEQ ID NO: 8571 - protein, 12 aa, synthetic construct
  REGION 1..12: note = ATaRI peptide
AESSPAKKVRSA

SEQ ID NO: 8572 - protein, 51 aa, synthetic construct
  REGION 1..51: note = ATaRI peptide
HMTPWSRKVLVLRTFLHGPIPLCPDTLPFFPLLTLWKTFLFLTNGFSLKSI

SEQ ID NO: 8573 - protein, 15 aa, synthetic construct
  REGION 1..15: note = ATaRI peptide
CIIPINVTGIVLVFS

SEQ ID NO: 8574 - protein, 19 aa, synthetic construct
  REGION 1..19: note = ATaRI peptide
DDVLIHCQVWKFCLFNVVF

SEQ ID NO: 8575 - protein, 55 aa, synthetic construct
  REGION 1..55: note = ATaRI peptide
HASAAPPSGMLAQGEPNLVHAPEMMSYSALMENRYTGSSLCFPSGLVSLKCHIYK

SEQ ID NO: 8576 - protein, 23 aa, synthetic construct
  REGION 1..23: note = ATaRI peptide
RKARMLYQWYSSSSFVWFRLIIK

SEQ ID NO: 8577 - protein, 15 aa, synthetic construct
  REGION 1..15: note = ATaRI peptide
NEQVLQVVVSIVFSL

SEQ ID NO: 8578 - protein, 9 aa, synthetic construct
  REGION 1..9: note = ATaRI peptide
QDSTGRVKR

SEQ ID NO: 8579 - protein, 39 aa, synthetic construct
  REGION 1..39: note = ATaRI peptide
PDSRQYQTGEGARVPWRSVLCELSEETLVCIHRGVTMAF

SEQ ID NO: 8580 - protein, 9 aa, synthetic construct
  REGION 1..9: note = ATaRI peptide
PSVGLVQSW

SEQ ID NO: 8581 - protein, 20 aa, synthetic construct
  REGION 1..20: note = ATaRI peptide
FRMLINQHSKLEFVGPVLKR

SEQ ID NO: 8582 - protein, 36 aa, synthetic construct
  REGION 1..36: note = ATaRI peptide
HMLFELFKVSGILKTWKEVFILNYFDSGHNGFIRLA

SEQ ID NO: 8583 - protein, 14 aa, synthetic construct
  REGION 1..14: note = ATaRI peptide
TDAVIYLKVLRFIC

SEQ ID NO: 8584 - protein, 21 aa, synthetic construct
  REGION 1..21: note = ATaRI peptide
DDDWIVDDGRWGGGGGGDVAS

SEQ ID NO: 8585 - protein, 12 aa, synthetic construct
  REGION 1..12: note = ATaRI peptide
YEDQYNQPGNHI

SEQ ID NO: 8586 - protein, 38 aa, synthetic construct
  REGION 1..38: note = ATaRI peptide
CWLEVKSPRKEKYMLRMLNRLLIDVVFKREVRKLIYLF

SEQ ID NO: 8587 - protein, 21 aa, synthetic construct
  REGION 1..21: note = ATaRI peptide
RSNMPKLGVIIIFKILFIYLF

SEQ ID NO: 8588 - protein, 11 aa, synthetic construct
  REGION 1..11: note = ATaRI peptide
SEAQKVTEVCI

SEQ ID NO: 8589 - protein, 28 aa, synthetic construct
  REGION 1..28: note = ATaRI peptide
VSQFEINKVNVAFIAEPSCCHVFFTSFR

SEQ ID NO: 8590 - protein, 11 aa, synthetic construct
  REGION 1..11: note = ATaRI peptide
TVSYVICQVNY

SEQ ID NO: 8591 - protein, 15 aa, synthetic construct
  REGION 1..15: note = ATaRI peptide
AVLIATWLGKCPKLT

SEQ ID NO: 8592 - protein, 77 aa, synthetic construct
  REGION 1..77: note = ATaRI peptide
PGNNNFVKVRISSEVYYKNVSFFKKSLQISLERSILWYNSYLIQFIESFSRIIEANSSLYLPVFLALWWIGTIITQN

SEQ ID NO: 8593 - protein, 29 aa, synthetic construct
  REGION 1..29: note = ATaRI peptide
SSEIYGLMVKNKQTNKKHTKKPKNKQKKT

SEQ ID NO: 8594 - protein, 23 aa, synthetic construct
  REGION 1..23: note = ATaRI peptide
VTTQSPESGKNVFVYYCHIFLVY

SEQ ID NO: 8595 - protein, 9 aa, synthetic construct
  REGION 1..9: note = ATaRI peptide
AKLDDMINR

SEQ ID NO: 8596 - protein, 18 aa, synthetic construct
  REGION 1..18: note = ATaRI peptide
SPDPRSPKVCWFVIFKIK

SEQ ID NO: 8597 - protein, 26 aa, synthetic construct
  REGION 1..26: note = ATaRI peptide
WLTAERMAVSLSVLLHRNKNLLKTRN

SEQ ID NO: 8598 - protein, 9 aa, synthetic construct
  REGION 1..9: note = ATaRI peptide
FGEAPQNLR

SEQ ID NO: 8599 - protein, 14 aa, synthetic construct
  REGION 1..14: note = ATaRI peptide
VQERLNFLRFVLYS

SEQ ID NO: 8600 - protein, 34 aa, synthetic construct
  REGION 1..34: note = ATaRI peptide
LAQQISDEVSFIKTSVTILTFLGPLILITVSFYR

SEQ ID NO: 8601 - protein, 18 aa, synthetic construct
  REGION 1..18: note = ATaRI peptide
EITKIYEKVRIITELYSL

SEQ ID NO: 8602 - protein, 12 aa, synthetic construct
  REGION 1..12: note = ATaRI peptide
IDWLKRIRVSFS

SEQ ID NO: 8603 - protein, 20 aa, synthetic construct
  REGION 1..20: note = ATaRI peptide
KGGANLIKVSSVFLVVSYIS

SEQ ID NO: 8604 - protein, 12 aa, synthetic construct
  REGION 1..12: note = ATaRI peptide
YYIGTAITSKYF

SEQ ID NO: 8605 - protein, 34 aa, synthetic construct
  REGION 1..34: note = ATaRI peptide
VVRGSASDWYIALDFHSYYTNVWFASLIDCFMFF

SEQ ID NO: 8606 - protein, 9 aa, synthetic construct
  REGION 1..9: note = ATaRI peptide
AILLPQPPR

SEQ ID NO: 8607 - protein, 39 aa, synthetic construct
  REGION 1..39: note = ATaRI peptide
FSVTNGGQVWCVCVCSETRASSVILLSPRAVSLIVASGF

SEQ ID NO: 8608 - protein, 44 aa, synthetic construct
  REGION 1..44: note = ATaRI peptide
KEAFWKKKGRLLLFMFKLYYMKKSQSFRIIEQKVLNRNKVFSNW

SEQ ID NO: 8609 - protein, 14 aa, synthetic construct
  REGION 1..14: note = ATaRI peptide
LGSQEALHVRNSQL

SEQ ID NO: 8610 - protein, 10 aa, synthetic construct
  REGION 1..10: note = ATaRI peptide
KATVLQQLGM

SEQ ID NO: 8611 - protein, 12 aa, synthetic construct
  REGION 1..12: note = ATaRI peptide
NPPTPSIYVSLN

SEQ ID NO: 8612 - protein, 26 aa, synthetic construct
  REGION 1..26: note = ATaRI peptide
KVPGSRTPGNLYELTYLVKMENKIKI

SEQ ID NO: 8613 - protein, 47 aa, synthetic construct
  REGION 1..47: note = ATaRI peptide
AHYCSICEVSNCFYPQLFYKASSLSTVGFSLFLKNFFILLCNPVYSN

SEQ ID NO: 8614 - protein, 14 aa, synthetic construct
  REGION 1..14: note = ATaRI peptide
QVYDQFTLVSQINM

SEQ ID NO: 8615 - protein, 15 aa, synthetic construct
  REGION 1..15: note = ATaRI peptide
PMLSWLNIRLVWNQG

SEQ ID NO: 8616 - protein, 46 aa, synthetic construct
  REGION 1..46: note = ATaRI peptide
NARKLIDEVRRKRREIVIHLDLKMYHSGVLPFFSNWLLEIQATLKL

SEQ ID NO: 8617 - protein, 102 aa, synthetic construct
  REGION 1..102: note = ATaRI peptide
NEHKKPAEVRSYSQFLDLSYSLDACLPKPHVEIISQCWRCRPNGRCLDHGNISLINRLMPSQSRGVSEFFTPLVPFRAGCYKESGTSSHSLLLRLWPCDHIC

SEQ ID NO: 8618 - protein, 26 aa, synthetic construct
  REGION 1..26: note = ATaRI peptide
KCNVCVHQVSESGDRHLPTVSLSEAQ

SEQ ID NO: 8619 - protein, 15 aa, synthetic construct
  REGION 1..15: note = ATaRI peptide
SCALWIPEVRIHPGP

SEQ ID NO: 8620 - protein, 16 aa, synthetic construct
  REGION 1..16: note = ATaRI peptide
VDAGRGGGGKGPGAGT

SEQ ID NO: 8621 - protein, 62 aa, synthetic construct
  REGION 1..62: note = ATaRI peptide
SSEEQSAEVRRGRAAPGLAGMGSQGPSVSGCSTVCRQLSTPVPSDCARWLCLTWRACSHSPL

SEQ ID NO: 8622 - protein, 54 aa, synthetic construct
  REGION 1..54: note = ATaRI peptide
PQAATEDDVRAPHGPGQEARLGLLQGPQLLPTPPSPATSAPFIPSPPPAPIPQH

SEQ ID NO: 8623 - protein, 144 aa, synthetic construct
  REGION 1..144: note = ATaRI peptide
TRWMEANQVALPHLNPPPNKYYFVIERSPSPDSYGHSSLPCGPVSHPPAPSLPFLTLTISSSHLSLPHWASHPEPTLTTGPFLPPGTSAAPSPLPAERSEKELPGWVLSPSFPLPRGWWGGHPSLGLARARTSFHPQDHWKSCQ

SEQ ID NO: 8624 - protein, 25 aa, synthetic construct
  REGION 1..25: note = ATaRI peptide
LQSANASVGEGVWPVGQESPHMSPA

SEQ ID NO: 8625 - protein, 128 aa, synthetic construct
  REGION 1..128: note = ATaRI peptide
RGPLSSAPGGSTGYPLSHMAPGCFPGVASWSHSSFSSKFSALSLPPMCSLLPLPSHLLSTPSVYLSICAPLLAFLPRPRGGGQKVPCLSQLPQGSLCPSALYDGLLSPLVPACPGPAFPGPLASPATT

SEQ ID NO: 8626 - protein, 9 aa, synthetic construct
  REGION 1..9: note = ATaRI peptide
CVVYRLIKG

SEQ ID NO: 8627 - protein, 10 aa, synthetic construct
  REGION 1..10: note = ATaRI peptide
VVCDGAPDGK

SEQ ID NO: 8628 - protein, 60 aa, synthetic construct
  REGION 1..60: note = ATaRI peptide
MSLAQACMVSGPPPNAHILFLPLLQSNQVPLQHLPFLCNTCLSSATLAFPLSFFLRLSFH

SEQ ID NO: 8629 - protein, 26 aa, synthetic construct
  REGION 1..26: note = ATaRI peptide
PWPQMTLQVSGSLQPWSRQPNRRLTV

SEQ ID NO: 8630 - protein, 13 aa, synthetic construct
  REGION 1..13: note = ATaRI peptide
MLLIGLLSGMVNC

SEQ ID NO: 8631 - protein, 15 aa, synthetic construct
  REGION 1..15: note = ATaRI peptide
QLIISTDEVTCSDVL

SEQ ID NO: 8632 - protein, 79 aa, synthetic construct
  REGION 1..79: note = ATaRI peptide
KNEAKRREVIMNGLNSLFLVVSINDTILGGENLRVLPMLMQTPFDPAIPLVGIYPTDILACVCTKVYKDSAASVNIVKN

SEQ ID NO: 8633 - protein, 11 aa, synthetic construct
  REGION 1..11: note = ATaRI peptide
IPGFWVKAVSF

SEQ ID NO: 8634 - protein, 55 aa, synthetic construct
  REGION 1..55: note = ATaRI peptide
EAELKKKWVSFLPWWGERGPALNARSAEVLNGRAKARVVRVVEAICGSRERGRLP

SEQ ID NO: 8635 - protein, 34 aa, synthetic construct
  REGION 1..34: note = ATaRI peptide
RQEEFEHKVRVQPLPLGRFAQSIFCRFSVKGKKV

SEQ ID NO: 8636 - protein, 27 aa, synthetic construct
  REGION 1..27: note = ATaRI peptide
QANEDTMECKCGQGGCTWSCTSGATQT

SEQ ID NO: 8637 - protein, 24 aa, synthetic construct
  REGION 1..24: note = ATaRI peptide
CLQETKVTSERSGFQDPYILFLSR

SEQ ID NO: 8638 - protein, 19 aa, synthetic construct
  REGION 1..19: note = ATaRI peptide
DHWDAVNLVRLPLGAWPHS

SEQ ID NO: 8639 - protein, 11 aa, synthetic construct
  REGION 1..11: note = ATaRI peptide
DSVGNTKTCKI

SEQ ID NO: 8640 - protein, 9 aa, synthetic construct
  REGION 1..9: note = ATaRI peptide
VLNLWDCGG

SEQ ID NO: 8641 - protein, 48 aa, synthetic construct
  REGION 1..48: note = ATaRI peptide
GSMQVFKQVSYQENRVLILGHNSIEYLVVITEFKLIFLSITCLGIEKR

SEQ ID NO: 8642 - protein, 13 aa, synthetic construct
  REGION 1..13: note = ATaRI peptide
EAVEWQQKVRHRA

SEQ ID NO: 8643 - protein, 22 aa, synthetic construct
  REGION 1..22: note = ATaRI peptide
EVHFQSKQVSHGKAWVCGLVVP

SEQ ID NO: 8644 - protein, 9 aa, synthetic construct
  REGION 1..9: note = ATaRI peptide
VPHKQGWVW

SEQ ID NO: 8645 - protein, 32 aa, synthetic construct
  REGION 1..32: note = ATaRI peptide
LRSQCLDQVSPRGAACREMVQGWGGGGHWAEG

SEQ ID NO: 8646 - protein, 23 aa, synthetic construct
  REGION 1..23: note = ATaRI peptide
TGMIESNRVSGDPQGNQPVGKEG

SEQ ID NO: 8647 - protein, 85 aa, synthetic construct
  REGION 1..85: note = ATaRI peptide
TSDSESSSSKCVSFLPCRVAPLCIPAILIPVLHSCHCCSEAGASFSHVHFEILEMLWPVHSPYGLGFTPWIKGEYKPYSAGRDLT

SEQ ID NO: 8648 - protein, 21 aa, synthetic construct
  REGION 1..21: note = ATaRI peptide
QEFGEYFTGKTPAALRGVLGN

SEQ ID NO: 8649 - protein, 14 aa, synthetic construct
  REGION 1..14: note = ATaRI peptide
GLIDFAIQVGKLGR

SEQ ID NO: 8650 - protein, 39 aa, synthetic construct
  REGION 1..39: note = ATaRI peptide
QRIKRILQVGQGRGGCGGSSGPNLGRNNRNLEKRRGAVK

SEQ ID NO: 8651 - protein, 60 aa, synthetic construct
  REGION 1..60: note = ATaRI peptide
FDSIFKKEACSIVCPCPLPFFPFGQELCLHQLCSSNRLIRFRSPSVSAGEHHLWGFEQIT

SEQ ID NO: 8652 - protein, 12 aa, synthetic construct
  REGION 1..12: note = ATaRI peptide
GHGLTSTQRYPK

SEQ ID NO: 8653 - protein, 33 aa, synthetic construct
  REGION 1..33: note = ATaRI peptide
DGALVNDEGEVWVVGSRRGRRLATYYVCTFLCV

SEQ ID NO: 8654 - protein, 10 aa, synthetic construct
  REGION 1..10: note = ATaRI peptide
KDQDSITGGK

SEQ ID NO: 8655 - protein, 25 aa, synthetic construct
  REGION 1..25: note = ATaRI peptide
PNDENLILGILLAEASVSSPLKTCC

SEQ ID NO: 8656 - protein, 9 aa, synthetic construct
  REGION 1..9: note = ATaRI peptide
KHIKKKAKV

SEQ ID NO: 8657 - protein, 37 aa, synthetic construct
  REGION 1..37: note = ATaRI peptide
QRIFDLQNKWVVLVLQKIQAGKGEEFQALFHNKEEVT

SEQ ID NO: 8658 - protein, 9 aa, synthetic construct
  REGION 1..9: note = ATaRI peptide
RTTKDEEFM

SEQ ID NO: 8659 - protein, 17 aa, synthetic construct
  REGION 1..17: note = ATaRI peptide
MKERPDLKVSIMWCDYS

SEQ ID NO: 8660 - protein, 13 aa, synthetic construct
  REGION 1..13: note = ATaRI peptide
LCDEKLKEVRQLE

SEQ ID NO: 8661 - protein, 9 aa, synthetic construct
  REGION 1..9: note = ATaRI peptide
LKEARIFDR

SEQ ID NO: 8662 - protein, 34 aa, synthetic construct
  REGION 1..34: note = ATaRI peptide
KGGGNAVKVSYWFLFFHVKYKFCLCVSTHKRQNA

SEQ ID NO: 8663 - protein, 10 aa, synthetic construct
  REGION 1..10: note = ATaRI peptide
AVRWHPQNSE

SEQ ID NO: 8664 - protein, 29 aa, synthetic construct
  REGION 1..29: note = ATaRI peptide
CGVPATSLCKREGVLGLEMPEIWQQRNEK

SEQ ID NO: 8665 - protein, 32 aa, synthetic construct
  REGION 1..32: note = ATaRI peptide
RNVMDRGKGKDETFLISFSIAFIFKPCDYITF

SEQ ID NO: 8666 - protein, 47 aa, synthetic construct
  REGION 1..47: note = ATaRI peptide
ETSNMMEYVSMRLFLIIFLFILNVPFSCVYHLSTIPSFFSSARTFVH

SEQ ID NO: 8667 - protein, 63 aa, synthetic construct
  REGION 1..63: note = ATaRI peptide
GLHIVLRWVSMHFLASNPEEKFICFHIKSESNLGNYNLCLSSVSLVITFYTILMFKCKWRSMN

SEQ ID NO: 8668 - protein, 34 aa, synthetic construct
  REGION 1..34: note = ATaRI peptide
KNAPRDALVSAKDKPRIAKPGAARDLRGGATLRA

SEQ ID NO: 8669 - protein, 19 aa, synthetic construct
  REGION 1..19: note = ATaRI peptide
KQLVKPEQVICLQRFMNFV

SEQ ID NO: 8670 - protein, 49 aa, synthetic construct
  REGION 1..49: note = ATaRI peptide
AGLVSARKGRVLKNIFSLNAMILVSEFCGHEKTSYALLNIIWIGYCKDF

SEQ ID NO: 8671 - protein, 12 aa, synthetic construct
  REGION 1..12: note = ATaRI peptide
IKTLADDVVRWS

SEQ ID NO: 8672 - protein, 48 aa, synthetic construct
  REGION 1..48: note = ATaRI peptide
EENRAHSVSECRGSGSSVGLSGFIVFFLGKSECLLKNLPAINVLEAAL

SEQ ID NO: 8673 - protein, 10 aa, synthetic construct
  REGION 1..10: note = ATaRI peptide
SGLKTMLPVS

SEQ ID NO: 8674 - protein, 9 aa, synthetic construct
  REGION 1..9: note = ATaRI peptide
LIRNDYYIR

SEQ ID NO: 8675 - protein, 26 aa, synthetic construct
  REGION 1..26: note = ATaRI peptide
GASASDGSVSNTSGLLGSGVLGAADA

What is claimed is:

1. A pharmaceutical composition comprising one or more peptides derived from aberrantly translated retained introns (ATaRIs).

2. The pharmaceutical composition according to claim 1, wherein the amino acid sequence of the ATaRI peptide comprises any one of SEQ ID NOs: 1-8675.

3. The pharmaceutical composition according to claim 1 or claim 2, comprising a plurality of peptides derived from ATaRIs.

4. The pharmaceutical composition according to any one of claims 1 to 3, further comprising one or more immune checkpoint inhibitors or one or more chemotherapeutic agents, or any combination thereof.

5. The pharmaceutical composition according to claim 4, wherein the immune checkpoint inhibitor comprises a PD-1 checkpoint inhibitor, a PD-L1 checkpoint inhibitor, a CTLA-4 checkpoint inhibitor, a TIGIT checkpoint inhibitor, or a LAG-3 checkpoint inhibitor, or any combination thereof.

6. The pharmaceutical composition according to claim 5, wherein the PD-1 checkpoint inhibitor comprises nivolumab, pembrolizumab, cetrelimab, or cemiplimab, or any combination thereof.

7. The pharmaceutical composition according to claim 5, wherein in the PD-L1 checkpoint inhibitor comprises atezolizumab, durvalab, or avelumab, or any combination thereof.

8. The pharmaceutical composition according to claim 5, wherein the CTLA-4 checkpoint inhibitor comprises ipilumumab or tremelimumab, or a combination thereof.

9. The pharmaceutical composition according to claim 4, wherein the chemotherapeutic agent comprises a tyrosine kinase inhibitor (TKI).

10. The pharmaceutical composition according to claim 9, wherein the TKI comprises bevacizumab, sunitinib, sorafenib, pazopanib, cabozantinib, lenvatinib, axitinib, or tivozanib, or any combination thereof.

11. The pharmaceutical composition according to claim 4, wherein the chemotherapeutic agent comprises a mammalian target of rapamycin (mTOR) inhibitor.

12. The pharmaceutical composition according to claim 11, wherein the mTOR inhibitor comprises temsirolimus or everolimus, or a combination thereof.

13. A method of treating a subject having cancer, wherein the subject comprises one or more deleterious mutations in the SET domain-containing 2 (SETD2) gene, the method comprising administering to the subject one or more peptides derived from aberrantly translated retained introns (ATaRIs) and/or one or more mRNA molecules encoding peptides derived from ATaRIs.

14. A method of immunizing a subject against cancer or eliciting an immune response to one or more peptides derived from aberrantly translated retained introns (ATaRIs) in a subject, wherein the subject comprises one or more deleterious mutations in the SET domain-containing 2 (SETD2) gene, the method comprising administering to the subject one or more peptides derived from ATaRIs and/or one or more mRNA molecules encoding peptides derived from ATaRIs.

15. The method according to claim 13 or claim 14, the method further comprising analyzing a biological sample obtained from the subject for the presence of the one or more deleterious mutations in the SETD2 gene.

16. The method according to any one of claims 13 to 15, wherein the amino acid sequence of the one or more peptides derived from ATaRI are selected from the group consisting of SEQ ID NOs: 1-8675.

17. The method according to any one of claims 13 to 16, wherein the cancer is SETD2-mutant liver cancer, mesothelioma, lung cancer, or kidney cancer.

18. The method according to claim 17, wherein the kidney cancer is clear cell renal cell carcinoma or papillary renal cell carcinoma.

19. The method according to any one of claims 13 to 18, wherein the biological sample is a tumor sample.

20. The method according to any one of claims 13 to 19, wherein the presence of the one or more deleterious mutations in the SETD2 gene is detected by nucleic acid sequencing or in-situ hybridization.

21. The method according to claim 20, wherein the nucleic acid sequencing is RNA sequencing.

22. The method according to any one of claims 13 to 21, wherein the deleterious mutations in the SETD2 gene lead to intron retention or activation of the unfolded protein response (UPR).

23. The method according to any one of claims 13 to 22, further comprising administering to the subject one or more immune checkpoint inhibitors or one or more chemotherapeutic agents, or any combination thereof.

24. The method according to claim 23, wherein the immune checkpoint inhibitor comprises a PD-1 checkpoint inhibitor, a PD-L1 checkpoint inhibitor, a CTLA-4 checkpoint inhibitor, a TIGIT checkpoint inhibitor, or a LAG-3 checkpoint inhibitor, or any combination thereof.

25. The method according to claim 24, wherein the PD-1 checkpoint inhibitor comprises nivolumab, pembrolizumab, cetrelimab, or cemiplimab, or any combination thereof.

26. The method according to claim 24, wherein in the PD-L1 checkpoint inhibitor comprises atezolizumab, durvalab, or avelumab, or any combination thereof.

27. The method according to claim 24, wherein the CTLA-4 checkpoint inhibitor comprises ipilumumab or tremelimumab, or a combination thereof.

28. The method according to claim 23, wherein the chemotherapeutic agent comprises a tyrosine kinase inhibitor (TKI).

29. The method according to claim 28, wherein the TKI comprises bevacizumab, sunitinib, sorafenib, pazopanib, cabozantinib, lenvatinib, axitinib, or tivozanib, or any combination thereof.

30. The method according to claim 23, wherein the chemotherapeutic agent comprises a mammalian target of rapamycin (mTOR) inhibitor.

31. The method according to claim 30, wherein the mTOR inhibitor comprises temsirolimus or everolimus, or a combination thereof.

32. The method according to any one of claims 13 to 31, further comprising administering another immunotherapy to the subject.

33. The method according to claim 32, wherein the another immunotherapy comprises chimeric antigen receptor-T cells (CAR-T), bone marrow transplant, adoptive transfer, interleukin-2, or interferon, or any combination thereof.
